(19) United States
(12) Patent Application Publication
(10) Pub. No.: US 2022/0010380 A1
(43) Pub. Date: Jan. 13, 2022

(54) COMPOSITIONS AND METHODS RELATED TO DIFFERENTIALLY METHYLATED DNA SEQUENCES ASSOCIATED WITH MONOALLELIC GENE EXPRESSION AND DISEASE

(71) Applicant: North Carolina State University, Raleigh, NC (US)

(72) Inventors: Cathrine Hoyo, Raleigh, NC (US); David Skaar, Raleigh, NC (US); Dereje Jima, Raleigh, NC (US); Randy L. Jirtle, Raleigh, NC (US)

(73) Assignee: North Carolina State University, Raleigh, NC (US)

(21) Appl. No.: 17/372,113

(22) Filed: Jul. 9, 2021

Related U.S. Application Data
(60) Provisional application No. 63/050,086, filed on Jul. 9, 2020.

(51) Int. Cl. C12Q 1/6883

(52) U.S. Cl. CPC C12Q 1/6883; C12Q 2600/154

(57) ABSTRACT

Provided are compositions and methods for determining an imprinting status of a gene subject to parent-of-origin, monoalleleic expression in a subject, and for using the information derived therefrom to detect a presence of and/or a susceptibility to a medical condition associated with monoallelic expression in a subject, predict a susceptibility to future development of a medical condition prior to the onset of any symptoms, monitor the development of such a medical condition and/or the effectiveness of a treatment, and for treating such a medical condition. In some embodiments, a composition for use in the disclosed methods is nucleic acid array, which in some embodiments can include one or more interrogatable nucleotide molecules, wherein the interrogatable nucleotide molecules are designed to allow identification of the DNA methylation status of one or more imprint control regions (ICRs) that regulate one or more genes subject to monoalleleic expression in subjects.

### CROSS-REFERENCE TO RELATED APPLICATION

[0001] This application claims the benefit of U.S. Provisional Patent Application Ser. No. 63/050,086, filed Jul. 9, 2020, the disclosure of which is incorporated herein by reference in its entirety.

### GOVERNMENT INTEREST

[0002] This invention was made with government support under grant numbers HD093351, HD098857, MD011746, and ES025128 awarded by the National Institutes of Health. The government has certain rights in the invention.

### TECHNICAL FIELD

[0003] The subject matter described herein relates to the identification and analysis of differentially methylated allelic DNA sequences associated with regulating monoallelic expression of imprinted genes (i.e., Imprint Control Regions (ICRs)). More specifically, the subject matter relates to genetic arrays (e.g., gene chips) that can be used to determine imprinting at genetic loci subject to parent-of-origin monoallelic gene expression, and methods for using the arrays and the data generated therefrom.

### BACKGROUND

[0004] Epigenetic regulation is a mechanism by which gene expression is altered by DNA modifications that do not alter the base sequence of genomic DNA. Cellular differentiation during development is an epigenetic mechanism, by which cell-type specific genes are silenced as cell fate is determined. Epigenetics is also a means by which organisms respond to environmental exposures, allowing adaptive responses. Such changes, particularly those that occur in early development, can cause long-term expression changes in mechanistic pathways contributing to a broad range of clinically important outcomes, including neurological disorders (Lorgen-Ritchie et al., 2019), cardio- and cerebrovascular diseases (Jirtle, 2004; Jirtle & Skinner, 2007), cancer (Hoyo et al., 2009; Pigeyre et al., 2016) and their major risk factors, including obesity (e.g. metabolism, nutrient acquisition, fat deposition, appetite, and satiety; Franks & McCarthy, 2016; Pigeyre et al., 2016). Both covalent DNA methylation at cytosines of CpG dinucleotides and histone modifications are epigenetic modifications known to regulate chromatin structure and gene expression. The stability of the DNA molecule has made DNA methylation a highly utilized marker, measurable from cell sources regardless of preservation (e.g., fresh, frozen, FFPE) by bisulfite sequencing using targeted and high-throughput applications.

[0005] However, cell-type specific DNA methylation, and ongoing environmentally-induced responsive changes complicate the use of DNA methylation in human case/control or cross-sectional exposed/non-exposed studies. In such studies, DNA methylation measured in peripheral cell types, accessible from otherwise healthy individuals, is not necessarily representative of the methylation in inaccessible cell types, tissues and organs involved in neurological and metabolic diseases. Additionally, these complex diseases themselves are capable of altering epigenetic marks, and this temporal ambiguity between methylation marks and disease complicates causal inference.

[0006] Methylation marks that control imprinted genes offer a unique opportunity to overcome these shortcomings, especially for assessing outcomes from early life exposures. The defining feature of genomic imprinting is monoallelic gene expression, regulated by differentially methylated regions (DMRs) that are defined by reciprocal methylation status of the parental alleles; these regulatory DMRs are referred to as imprint control regions (ICRs). Epi-mutations (e.g., aberrant methylation) of ICRs are associated with growth and nutrient acquisition (reviewed in Cassidy & Charalambous, 2018). Because an important role of genomic imprinting is also to control gene dosage, methylation marks are similar across individuals. Unlike methylation levels which naturally diverge with cell differentiation and aging, these methylation marks are established prior to germ-layer specification, and are maintained in somatic tissues throughout life (Murphy, 2012). Thus, similarity across all tissues allows ascertainment of ICR methylation in peripheral cells as a proxy for normally inaccessible tissues. Moreover, stability with age makes these marks long-term records of early exposures. Imprinted genes are estimated to comprise 1-6% of the human genome (Luedi et al., 2007). These genes are over-selected for growth regulators, are critical in early embryonic development (Waterland, 2003) and altered expression results in growth disorders (Kitsiou-Tzeli & Tzetis, 2017). However, only 24 ICRs regulating approximately 120 imprinted genes are currently known (Skaar et al., 2012; Bernal et al., 2013).

[0007] Among diseases for which early detection could decrease risk of progression is Alzheimer's Disease (AD), a neuro-degenerative condition whose prevalence is on the increase. In the US, the annual costs of AD already exceed $280 billion, including $186 billion in Medicare and Medicaid payments, and estimates suggest that early diagnosis of Alzheimer's disease could save the nation ˜$7 trillion in long-term health care costs according to estimates from the Alzheimer's Association. Multiple lines of evidence suggest that multiple prenatal exposures contribute to AD risk, that susceptibility can be connected to early childhood risk factors (Seifan et al., 2015), and that performance on cognitive measures in early adulthood are predictive of Alzheimer risk (Snowdon et al., 1996). Related to such data and significant for this work, a handful of ICRs regulating known imprinted genes have been associated with AD risk (Lorgen-Ritchie et al., 2019). Two other psychiatric conditions with developmental origins are autism and schizophrenia, considered two sides of the same coin, as they are reciprocal regarding brain overdevelopment (autism) and underdevelopment (schizophrenia). It has been theorized that the origins of these two disorders lie in dysregulation of imprinted genes, with their alternative roles in promoting and restricting early growth and development (Crespi, 2008), and imprinted genes and regions have been connected to these conditions (Li et al., 2020), Such sequence regions could be developed into early risk markers diseases, disorders, and/or conditions including but not limited to those associated with neurological diseases, disorders, and/or conditions, but as yet, remain uncharacterized.

### SUMMARY

[0008] This Summary lists several embodiments of the presently disclosed subject matter, and in many cases lists variations and permutations of these embodiments. This Summary is merely exemplary of the numerous and varied embodiments. Mention of one or more representative features of a given embodiment is likewise exemplary. Such an embodiment can typically exist with or without the feature(s) mentioned; likewise, those features can be applied to other embodiments of the presently disclosed subject matter, whether listed in this summary or not. To avoid excessive repetition, this Summary does not list or suggest all possible combinations of such features.

[0009] In some embodiments, the presently disclosed subject matter relates to methods for determining an imprinting status of a gene subject to parent-of-origin, monoalleleic expression in a subject. In some embodiments, the methods comprise (a) providing a nucleic acid preparation isolated from a cell, tissue, or organ of the subject, wherein the nucleic acid preparation comprises genomic DNA sequences derived from both alleles of the gene and that correspond to one or more Imprint Control Regions (ICRs) selected from the group consisting of ICRs 1-1611 as disclosed herein and/or the genomic regions associated with SEQ ID NOs: 1612-1816; and (b) identifying in the nucleic acid preparation the degree of and/or locations of methylation of both alleles of the gene with respect to the one or more ICRs and/or the genomic regions associated with SEQ ID NOs: 1612-1816, whereby an imprinting status of the gene in the subject is identified. In some embodiments, the subject is a human. In some embodiments, the genomic DNA sequences correspond to at least 100, 250, 500, 1000, or all of ICRs 1-1611 and/or the genomic regions associated with SEQ ID NOs: 1612-1816. In some embodiments, the identifying comprises interrogating a nucleic acid array that comprises nucleic acids that correspond to ICRs 1-1611 and/or the genomic regions associated with SEQ ID NOs: 1612-1816 and/or an informative subset thereof. In some embodiments, the interrogating comprises hybridizing bisulfite converted genomic DNA present in the nucleic acid preparation to a plurality of target probes, wherein the plurality of target probes correspond to the ICRs 1-1611 and/or the genomic regions associated with SEQ ID NOs: 1612-1816 and/or the informative subset thereof. In some embodiments, the interrogating comprises (a) hybridizing genomic DNA present in the nucleic acid preparation subsequent to a bisulfite converting treatment to the plurality of target probes present on a solid support, and further wherein the solid support comprises, consists essentially of, or consists of (i) target probes that comprise, consist essentially of, or consist of nucleotide sequences that are complementary to the nucleic acid sequences of ICRs 1-1611 and/or the genomic regions associated with SEQ ID NOs: 1612-1816 and/or the informative subset of prior to the bisulfite converting treatment; and (ii) target probes that comprise, consist essentially of, or consist of nucleotide sequences that differ from (i) above and are only complementary to the nucleic acid sequences of ICRs 1-1611 and/or the genomic regions associated with SEQ ID NOs: 1612-1816 and/or the informative subset of subsequent to the bisulfite converting treatment; and (c) calculating a methylation fraction of the genomic DNA present in the nucleic acid preparation by determining a ratio of hybridization of the target probes of (a) to the target probes of (b), wherein the ratio of hybridization provides a measure of the methylation fraction.

[0010] In some embodiments, the presently disclosed subject matter also relates to methods for detecting a presence of and/or a susceptibility to a medical condition associated with monoallelic gene expression in a subject. In some embodiments, the methods comprise (a) obtaining a biological sample from the subject, wherein the biological sample comprises one or more nucleic acid molecules that correspond to an Imprint Control Region (ICR) selected from the group consisting of ICRs 1-1611 and/or the genomic regions associated with SEQ ID NOs: 1612-1816 and/or a subset thereof; (b) analyzing the one or more nucleic acid molecules to determine the DNA methylation status of one or both alleles of at least one imprinted gene associated with at least one of ICRs 1-1611 and/or the genomic regions associated with SEQ ID NOs: 1612-1816; and (c) comparing the DNA methylation status of the one or both alleles of the at least one imprinted gene associated with the at least one of ICRs 1-1611 and/or the genomic regions associated with SEQ ID NOs: 1612-1816 to a control DNA methylation status, wherein the comparing detects a presence of and/or a susceptibility to a medical condition associated with monoallelic gene expression in a subject. In some embodiments, the DNA methylation status comprises one or more epigenomic features of at least one imprinted gene. In some embodiments, the one or more epigenomic features comprises a methylation profile of the subject with respect to at least one imprinted gene. In some embodiments, the one or more epigenomic features are selected from the group consisting of a DNA sequence methylation state, a nucleosome positioning feature, and a histone modification. In some embodiments, the one or more epigenomic features relates to a gene for which expression or lack of expression is associated with the medical condition. In some embodiments, the medical condition is Alzheimer's disease, autism, and schizophrenia. In some embodiments, at least one imprinted gene is selected from the set of genes associated with Alzheimer's disease (AD), where in the set of genes is identified as being associated with AD based on proximity to epigenomic features, correlated expression in association to epigenomic features, or reported association to Alzheimer disease in combination with either of the first two criteria. In some embodiments, the biological sample comprises genomic DNA isolated from a cell, tissue, or organ of the subject, optionally a cell, tissue, or organ that is not affected by the medical condition.

[0011] In some embodiments, the presently disclosed subject matter also relates to methods for predicting susceptibility to future development of a medical condition associated with monoallelic expression in a subject prior to the onset of any symptoms of the medical condition in the subject. In some embodiments, the methods comprise (a) a biological sample from the subject, wherein the biological sample comprises one or more nucleic acid molecules that correspond to an Imprint Control Region (ICR) selected from the group consisting of ICRs 1-1611 and/or the genomic regions associated with SEQ ID NOs: 1612-1816 and/or a subset thereof; (b) analyzing the one or more nucleic acid molecules to determine the DNA methylation status of one or both alleles of at least one imprinted gene associated with at least one of ICRs 1-1611 and/or the genomic regions associated with SEQ ID NOs: 1612-1816; and (c) determining whether the DNA methylation status determined correlates with future development of the medical condition, whereby a susceptibility to future development of the medical condition is predicted. In some embodiments, the DNA methylation status comprises one or more epigenomic features of at least one imprinted gene. In some embodiments, one or more epigenomic features comprises a methylation profile of the subject with respect to at least one imprinted gene. In some embodiments, one or more epigenomic features are selected from the group consisting of a DNA sequence methylation state, a nucleosome positioning feature, and a histone modification. In some embodiments, the one or more epigenomic features relates to a gene for which expression or lack of expression is associated with the medical condition. In some embodiments, the medical condition is Alzheimer's disease, autism, schizophrenia, and/or a malignancy, which in some embodiments can be hepatocellular carcinoma. In some embodiments, the at least one imprinted gene is a gene as disclosed herein. In some embodiments, the biological sample comprises genomic DNA isolated from any cell, tissue, or organ of the subject, including a cell, tissue, or organ that is generally unaffected in subjects who have the medical condition, and not necessarily usable for diagnosis of conditions affecting target tissues by means specific to those affected tissues, including, but not limited to, physical morphology, immunological assays, protein expression, or RNA expression.

[0012] In some embodiments, the presently disclosed subject matter also relates to nucleic acid arrays comprising one or more interrogatable nucleotide molecules, wherein the interrogatable nucleotide molecules are designed to allow identification of the DNA methylation status of ICRs that regulate one or more genes subject to monoalleleic expression in a biological sample isolated from a subject. In some embodiments, the nucleic acid array comprises, consists essentially of, or consists of a plurality of interrogatable nucleotide molecules that correspond to one or more of ICRs 1-1611 and/or the genomic regions associated with SEQ ID NOs: 1612-1816, optionally wherein the interrogatable nucleotide molecules comprise, consist essentially of, or consist of (a) target probes that comprise, consist essentially of, or consist of nucleotide sequences that are complementary to the nucleic acid sequences of ICRs 1-1611 and/or the genomic regions associated with SEQ ID NOs: 1612-1816 and/or an informative subset thereof; and (b) target probes that comprise, consist essentially of, or consist of nucleotide sequences that are complementary to the nucleic acid sequences of ICRs 1-1611 and/or the genomic regions associated with SEQ ID NOs: 1612-1816 and/or the informative subset thereof subsequent to exposing the nucleic acid sequences of ICRs 1-1611 and/or the genomic regions associated with SEQ ID NOs: 1612-1816 and/or the informative subset thereof to a bisulfite converting treatment. In some embodiments, the interrogatable nucleotide molecules can be interrogated with human genomic DNA. In some embodiments, the plurality of interrogatable nucleotide molecules correspond to at least 100, 250, 500, 1000, or all of ICRs 1-1611 and/or the genomic regions associated with SEQ ID NOs: 1612-1816.

[0013] Accordingly, it is an object of the presently disclosed subject matter to provide compositions and methods for assessing differentially methylated DNA sequences associated with monoallelic gene expression and disease.

[0014] An object of the presently disclosed subject matter having been stated hereinabove, and which is achieved in whole or in part by the compositions and methods disclosed herein, other objects will become evident as the description proceeds when taken in connection with the accompanying Figures as best described herein below.

### BRIEF DESCRIPTION OF THE FIGURES

[0015] FIGS. 1A-1E. Detection of ICRs based upon genome-wide DNA methylation sequences from conceptal kidney, liver, and brain, as well as gametes. FIG. 1A is a graph showing the coverage (number of reads per base pair) for brain, kidney, liver, sperm, and oocytes. Putative ICRs are identified based on consecutive CpGs with allele specific differential methylation in a specified range. Narrowing of the methylation window centered on 50% reduces the number of candidates (FIG. 1B) but continues to identify the majority of known ICRs (FIG. 1C). The size range of candidates is similar with known ICRs (FIGS. 1D and 1E). For many of the known ICRs, overlapping candidate ICRs extend beyond the current definitions.

[0016] FIGS. 2A-2D. Example of known and novel putative ICRs. MEG3 and PEG10 have associated known ICR loci (FIGS. 2A and 2B), and in both cases are overlapped by candidate ICRs that extend beyond the current definitions. Using the identification criteria, novel ICRs were detected for IGF2R and KCNQ1OT1 (FIGS. 2C and 2D). IGF2R is imprinted in some mammals, but does not have consistently observed imprinted expression in humans.

[0017] FIGS. 3A-3F. Identification of Alzheimer's Disease (AD) DMRs and overlap with ICRs. Using DNA from AD cases and controls, for both African American (AA) and European American (EA) patients, DNA regions with differential methylation between cases and controls were identified. An excellent bisulfite conversion rate was attained in all cases (FIG. 3A). Moreover, the coverage range was between 15×-36× (FIGS. 3B and 3C) with no sequence duplication bias (FIG. 3D). The total DMRs detected from cases and controls from EA and AA groups separately and combined, and the overlap were shown (FIG. 3D). In the case of the EA samples, patient blood was available for comparison with matching controls to generate DMRs, which were intersected with the DMRs generated from AD patient brain tissue (FIGS. 3E and 3F).

[0018] FIGS. 4A-4C. Overlap of a putative ICR overlapping an AD DMR in AAs and EAs. Overlap of AD DMRs with 1495 ICRs (FIG. 4A). An AD case-control comparison identified a DMR mapping to AKAP2, which overlaps an ICR identified from conceptal tissues and gametes. (FIG. 4B). There are also a set of regions in the intersection between AD brain DMRs, AD blood DMRs, and ICRs. (FIG. 4C).

[0019] FIG. 5. Workflow to identify putative ICRs. FIG. 5 shows an exemplary workflow for identifying putative ICRs.

[0020] FIG. 6. Venn diagram illustrating DMR to ICR mapping results. AA: African American, W: White, AD: Alzheimer's Disease.

### BRIEF DESCRIPTION OF THE SEQUENCE LISTING

[0021] SEQ ID NOs: 1-1611 are the nucleotide sequences of imprint control regions (ICRs) 1-1611 present in the human genome. SEQ ID NOs: 1-1611 correspond to ICR_1 through ICR_1611, respectively.

[0022] SEQ ID NOs: 1612-1816 are the nucleotide sequences of human genomic sequences that were identified in whole genome methylation analyses in Alzheimer's patients but that did not align with any of the ICRs corresponding to SEQ ID NOs: 1-1611.

### DETAILED DESCRIPTION

[0023] Disclosed herein is the identification of human ICRs through methyl-sequencing of fetal tissues representing the three germ layers, the endoderm, mesoderm, and ectoderm, as well as using methyl-sequence from gametes. Also disclosed herein are assessments of the similarities of methylation marks of ICRs in accessible cell types including mixed leukocytes, monocytes, and human umbilical vein endothelial cells (HUVECs). Using frontal cortex-derived DNA, it is shown that aberrant methylation of a sizable proportion of ICRs was found in Alzheimer's disease but not control brains.

### I. Definitions

[0024] All technical and scientific terms used herein, unless otherwise defined below, are intended to have the same meaning as commonly understood by one of ordinary skill in the art. References to techniques employed herein are intended to refer to the techniques as commonly understood in the art, including variations on those techniques or substitutions of equivalent techniques that would be apparent to one of skill in the art. While the following terms are believed to be well understood by one of ordinary skill in the art, the following definitions are set forth to facilitate explanation of the presently disclosed subject matter.

[0025] Following long-standing patent law convention, the terms “a,” “an,” and “the” mean “one or more” when used in this application, including the claims. Thus, the phrase “a cell” refers to one or more cells, unless the context clearly indicates otherwise.

[0026] As used herein, the term “and/or” when used in the context of a list of entities, refers to the entities being present singly or in combination. Thus, for example, the phrase “A, B, C, and/or D” includes A, B, C, and D individually, but also includes any and all combinations and subcombinations of A, B, C, and D.

[0027] The term “comprising,” which is synonymous with “including,” “containing,” and “characterized by,” is inclusive or open-ended and does not exclude additional, unrecited elements and/or method steps. “Comprising” is a term of art that means that the named elements and/or steps are present, but that other elements and/or steps can be added and still fall within the scope of the relevant subject matter.

[0028] As used herein, the phrase “consisting of” excludes any element, step, and/or ingredient not specifically recited. For example, when the phrase “consists of” appears in a clause of the body of a claim, rather than immediately following the preamble, it limits only the element set forth in that clause; other elements are not excluded from the claim as a whole.

[0029] As used herein, the phrase “consisting essentially of” limits the scope of the related disclosure or claim to the specified materials and/or steps, plus those that do not materially affect the basic and novel characteristic(s) of the disclosed and/or claimed subject matter.

[0030] With respect to the terms “comprising,” “consisting essentially of,” and “consisting of,” where one of these three terms is used herein, the presently disclosed and claimed subject matter can include the use of either of the other two terms. For example, it is understood that the methods of the presently disclosed subject matter in some embodiments comprise the steps that are disclosed herein and/or that are recited in the claims, in some embodiments consist essentially of the steps that are disclosed herein and/or that are recited in the claims, and in some embodiments consist of the steps that are disclosed herein and/or that are recited in the claim.

[0031] The term “subject” as used herein refers to a member of any invertebrate or vertebrate species. Accordingly, the term “subject” is intended to encompass any member of the Kingdom Animalia including, but not limited to the phylum Chordata (i.e., members of Classes Osteichythyes (bony fish), Amphibia (amphibians), Reptilia (reptiles), Ayes (birds), and Mammalia (mammals)), and all Orders and Families encompassed therein. In some embodiments, the presently disclosed subject matter relates to human subjects.

[0032] Similarly, all genes, gene names, and gene products disclosed herein are intended to correspond to orthologs from any species for which the compositions and methods disclosed herein are applicable. Thus, the terms include, but are not limited to genes and gene products from humans. It is understood that when a gene or gene product from a particular species is disclosed, this disclosure is intended to be exemplary only, and is not to be interpreted as a limitation unless the context in which it appears clearly indicates. Thus, for example, the genes and/or gene products disclosed herein are also intended to encompass homologous genes and gene products from other animals including, but not limited to other mammals, fish, amphibians, reptiles, and birds.

[0033] The methods and compositions of the presently disclosed subject matter are particularly useful for warm-blooded vertebrates. Thus, the presently disclosed subject matter concerns mammals and birds. More particularly provided is the use of the methods and compositions of the presently disclosed subject matter on mammals such as humans and other primates, as well as those mammals of importance due to being endangered (such as Siberian tigers), of economic importance (animals raised on farms for consumption by humans) and/or social importance (animals kept as pets or in zoos) to humans, for instance, carnivores other than humans (such as cats and dogs), swine (pigs, hogs, and wild boars), ruminants (such as cattle, oxen, sheep, giraffes, deer, goats, bison, and camels), rodents (such as mice, rats, and rabbits), marsupials, and horses. Also provided is the use of the disclosed methods and compositions on birds, including those kinds of birds that are endangered, kept in zoos, as well as fowl, and more particularly domesticated fowl, e.g., poultry, such as turkeys, chickens, ducks, geese, guinea fowl, and the like, as they are also of economic importance to humans. Thus, also provided is the application of the methods and compositions of the presently disclosed subject matter to livestock, including but not limited to domesticated swine (pigs and hogs), ruminants, horses, poultry, and the like.

[0034] The term “about,” as used herein when referring to a measurable value such as an amount of weight, time, dose, etc., is meant to encompass variations of in some embodiments ±20%, in some embodiments ±10%, in some embodiments ±5%, in some embodiments ±1%, and in some embodiments ±0.1% from the specified amount, as such variations are appropriate to perform the disclosed methods and/or to employ the presently disclosed arrays.

[0035] As used herein the term “gene” refers to a hereditary unit including a sequence of DNA that occupies a specific location on a chromosome and that contains the genetic instruction for a particular characteristic or trait in an organism. Similarly, the phrase “gene product” refers to biological molecules that are the transcription and/or translation products of genes. Exemplary gene products include, but are not limited to mRNAs and polypeptides that result from translation of mRNAs. Any of these naturally occurring gene products can also be manipulated in vivo or in vitro using well known techniques, and the manipulated derivatives can also be gene products. For example, a cDNA is an enzymatically produced derivative of an RNA molecule (e.g., an mRNA), and a cDNA is considered a gene product. Additionally, polypeptide translation products of mRNAs can be enzymatically fragmented using techniques well known to those of skill in the art, and these peptide fragments are also considered gene products.

[0036] As used herein, the phrase “derived from” refers to an entity that is present either in another entity and/or in some embodiments in the same entity but in a different context. In terms of biological samples and nucleic acids, the phrase “derived from” can be synonymous with “isolated from”. However, especially in the case of a biological molecule, the phrase “derived from” can also refer to the fact that the biological molecule is present in a different context or form in one situation versus another. For example, in some embodiments, the presently disclosed methods employ nucleic acid molecules “derived from” a gene (e.g., a gene listed in any of the Tables disclosed herein). In this context, it is understood that a nucleic acid molecule is “derived from” a gene if the nucleic acid molecule can be generated naturally or artificially by employing genetic and/or epigenomic information that is associated with the gene in the subject. In some embodiments, a nucleic acid molecule is “derived from” a gene if it is encoded by the gene, is a transcription product of the gene, or otherwise is generated based on genetic or non-genetic information that is provided by the gene.

[0037] As used herein, the term “fragment” refers to a sequence that comprises a subset of another sequence. When used in the context of a nucleic acid or amino acid sequence, the terms “fragment” and “subsequence” are used interchangeably. A fragment of a nucleic acid sequence can be any number of nucleotides that is less than that found in another nucleic acid sequence, and thus includes, but is not limited to, the sequences of an exon or intron, a promoter, an imprint regulatory element, an enhancer, an origin of replication, a 5′ or 3′ untranslated region, a coding region, and/or a polypeptide binding domain. It is understood that a fragment or subsequence can also comprise less than the entirety of a nucleic acid sequence, for example, a portion of an exon or intron, promoter, enhancer, etc. Similarly, a fragment or subsequence of an amino acid sequence can be any number of residues that is less than that found in a naturally occurring polypeptide, and thus includes, but is not limited to, domains, features, repeats, etc. Also similarly, it is understood that a fragment or subsequence of an amino acid sequence need not comprise the entirety of the amino acid sequence of the domain, feature, repeat, etc.

[0038] As used herein, the term “gene” is used broadly to refer to any segment of DNA associated with a biological function. Thus, genes include, but are not limited to, coding sequences, the regulatory sequences required for their expression (e.g., 5′ regulator sequences, 3′ regulatory sequences, and combinations thereof), intron sequences associated with the coding sequences, and combinations thereof. Genes can also include non-expressed DNA segments that, for example, form recognition sequences for a polypeptide. Genes can be obtained from a variety of sources, including cloning from a source of interest or synthesizing from known or predicted sequence information, and can include sequences designed to have desired parameters.

[0039] The phrase “hybridizing specifically to” refers to the binding, duplexing, or hybridizing of a molecule only to a particular nucleotide sequence under stringent conditions when that sequence is present in a complex mixture (e.g., total cellular) of DNA and/or RNA. The phrase “bind(s) substantially” refers to complementary hybridization between a probe nucleic acid and a target nucleic acid and embraces minor mismatches that can be accommodated by reducing the stringency of the hybridization media to achieve the desired detection of the target nucleic acid sequence.

[0040] As used herein, the term “isolated”, when used in the context of an isolated nucleic acid or an isolated polypeptide, is a nucleic acid or polypeptide that, by the hand of man, exists apart from its native environment and is therefore not a product of nature. An isolated nucleic acid molecule or polypeptide can exist in a purified form or can exist in a non-native environment such as, for example, in a transformed host cell.

[0041] As used herein, the term “native” refers to a gene that is naturally present in the genome of an untransformed cell. Similarly, when used in the context of a polypeptide, a “native polypeptide” is a polypeptide that is encoded by a native gene of an untransformed cell's genome. Thus, the terms “native” and “endogenous” are synonymous.

[0042] As used herein, the term “naturally occurring” refers to an object that is found in nature as distinct from being artificially produced or manipulated by man. For example, a polypeptide or nucleotide sequence that is present in an organism (including a virus) in its natural state, which has not been intentionally modified or isolated by man in the laboratory, is naturally occurring. As such, a polypeptide or nucleotide sequence is considered “non-naturally occurring” if it is encoded by or present within a recombinant molecule, even if the amino acid or nucleic acid sequence is identical to an amino acid or nucleic acid sequence found in nature.

[0043] As used herein, the term “nucleic acid” refers to deoxyribonucleotides or ribonucleotides and polymers thereof in either single or double stranded form. Unless specifically limited, the term encompasses nucleic acids containing known analogues of natural nucleotides that have similar binding properties as the reference nucleic acid and are metabolized in a manner similar to naturally occurring nucleotides. Unless otherwise indicated, a particular nucleic acid sequence also implicitly encompasses conservatively modified variants thereof (e.g., degenerate codon substitutions) and complementary sequences and as well as the sequence explicitly indicated. Specifically, degenerate codon substitutions can be achieved by generating sequences in which the third position of one or more selected (or all) codons is substituted with mixed base and/or deoxyinosine residues (Ohtsuka et al., 1985; Batzer et al., 1991; Rossolini et al., 1994). The terms “nucleic acid” or “nucleic acid sequence” can also be used interchangeably with gene, cDNA, and mRNA encoded by a gene.

[0044] As used herein, the phrase “oligonucleotide” refers to a polymer of nucleotides of any length. In some embodiments, an oligonucleotide is a primer that is used in a polymerase chain reaction (PCR) and/or reverse transcription-polymerase chain reaction (RT-PCR), and the length of the oligonucleotide is typically between about 15 and 30 nucleotides. In some embodiments, the oligonucleotide is present on an array and is specific for a gene of interest. In whatever embodiment that an oligonucleotide is employed, one of ordinary skill in the art is capable of designing the oligonucleotide to be of sufficient length and sequence to be specific for the gene of interest (i.e., that would be expected to specifically bind only to a product of the gene of interest under a given hybridization condition).

[0045] As used herein, the phrase “percent identical”, in the context of two nucleic acid or polypeptide sequences, refers to two or more sequences or subsequences that have in some embodiments 60%, in some embodiments 70%, in some embodiments 75%, in some embodiments 80%, in some embodiments 85%, in some embodiments 90%, in some embodiments 92%, in some embodiments 94%, in some embodiments 95%, in some embodiments 96%, in some embodiments 97%, in some embodiments 98%, in some embodiments 99%, and in some embodiments 100% nucleotide or amino acid residue identity, respectively, when compared and aligned for maximum correspondence, as measured using one of the following sequence comparison algorithms or by visual inspection. The percent identity exists in some embodiments over a region of the sequences that is at least about 50 residues in length, in some embodiments over a region of at least about 100 residues, and in some embodiments, the percent identity exists over at least about 150 residues. In some embodiments, the percent identity exists over the entire length of the sequences.

[0046] For sequence comparison, typically one sequence acts as a reference sequence to which test sequences are compared. When using a sequence comparison algorithm, test and reference sequences are input into a computer, subsequence coordinates are designated if necessary, and sequence algorithm program parameters are designated. The sequence comparison algorithm then calculates the percent sequence identity for the test sequence(s) relative to the reference sequence, based on the designated program parameters.

[0047] Optimal alignment of sequences for comparison can be conducted, for example, by the local homology algorithm disclosed in Smith & Waterman, 1981; by the homology alignment algorithm disclosed in Needleman & Wunsch, 1970; by the search for similarity method disclosed in Pearson & Lipman, 1988; by computerized implementations of these algorithms (GAP, BESTFIT, FASTA, and TFASTA in the GCG® WISCONSIN PACKAGE®, available from Accelrys, Inc., San Diego, Calif., United States of America), or by visual inspection. See generally, Altschul et al., 1990; Ausubel et al., 2002; and Ausubel et al., 2003.

[0048] One example of an algorithm that is suitable for determining percent sequence identity and sequence similarity is the BLAST algorithm, which is described in Altschul et al., 1990. Software for performing BLAST analysis is publicly available through the website of the National Center for Biotechnology Information. This algorithm involves first identifying high scoring sequence pairs (HSPs) by identifying short words of length W in the query sequence, which either match or satisfy some positive valued threshold score T when aligned with a word of the same length in a database sequence. T is referred to as the neighborhood word score threshold. See generally, Altschul et al., 1990. These initial neighborhood word hits act as seeds for initiating searches to find longer HSPs containing them. The word hits are then extended in both directions along each sequence for as far as the cumulative alignment score can be increased. Cumulative scores are calculated using, for nucleotide sequences, the parameters M (reward score for a pair of matching residues; always >0) and N (penalty score for mismatching residues; always <0). For amino acid sequences, a scoring matrix is used to calculate the cumulative score. Extension of the word hits in each direction are halted when the cumulative alignment score falls off by the quantity X from its maximum achieved value, the cumulative score goes to zero or below due to the accumulation of one or more negative scoring residue alignments, or the end of either sequence is reached. The BLAST algorithm parameters W, T, and X determine the sensitivity and speed of the alignment. The BLASTN program (for nucleotide sequences) uses as defaults a wordlength (W) of 11, an expectation (E) of 10, a cutoff of 100, M=5, N=4, and a comparison of both strands. For amino acid sequences, the BLASTP program uses as defaults a wordlength (W) of 3, an expectation (E) of 10, and the BLOSUM62 scoring matrix. See Henikoff & Henikoff, 1992.

[0049] In addition to calculating percent sequence identity, the BLAST algorithm also performs a statistical analysis of the similarity between two sequences (see e.g., Karlin & Altschul, 1993). One measure of similarity provided by the BLAST algorithm is the smallest sum probability (P(N)), which provides an indication of the probability by which a match between two nucleotide or amino acid sequences would occur by chance. For example, a test nucleic acid sequence is considered similar to a reference sequence if the smallest sum probability in a comparison of the test nucleic acid sequence to the reference nucleic acid sequence is in some embodiments less than about 0.1, in some embodiments less than about 0.01, and in some embodiments less than about 0.001.

[0050] As used herein, the term “subject” refers to any organism for which analysis of gene expression would be desirable. Thus, the term “subject” is desirably a human subject, although it is to be understood that the principles of the presently disclosed subject matter indicate that the presently disclosed subject matter is effective with respect to invertebrate and to all vertebrate species, including Therian mammals (e.g., Marsupials and Eutherians), which are intended to be included in the term “subject”. Moreover, a mammal is understood to include any mammalian species in which detection of differential gene expression is desirable, particularly agricultural and domestic mammalian species. The methods of the presently disclosed subject matter are particularly useful in the analysis of gene expression in warm-blooded vertebrates, e.g., mammals.

[0051] More particularly, the presently disclosed subject matter can be used for assessing imprinting and its consequences in a mammal such as a human. Also provided is the analysis of gene expression in mammals of importance due to being endangered (such as Siberian tigers), of economic importance (animals raised on farms for consumption by humans) and/or social importance (animals kept as pets or in zoos) to humans, for instance, carnivores other than humans (such as cats and dogs), swine (pigs, hogs, and wild boars), ruminants (such as cattle, oxen, sheep, giraffes, deer, goats, bison, and camels), and horses (e.g., thoroughbreds and race horses).

[0052] Additionally, in some embodiments the term “subject” refers to a biological sample as defined herein, which includes but is not limited to a cell, tissue, or organ that is isolated from an organism. Thus, it is understood that the methods and compositions disclosed herein can be employed for assessing imprinting and its consequences in a subject that is an organism but can also be employed for assessing imprinting and its consequences in a subject that is a biological sample isolated from an organism. Accordingly, the methods and compositions disclosed herein are intended to be applicable to assessing imprinting and its consequences in vivo as well as in vitro.

### II. Compositions Including Interrogatable Nucleic Acid Arrays

[0053] In some embodiments, the presently disclosed subject matter relates to nucleic acid arrays comprising, consisting essentially of, or consisting of one or more interrogatable nucleotide molecules, wherein the interrogatable nucleotide molecules are designed to allow identification of the DNA methylation status of one or more of ICRs that regulate one or more genes subject to monoalleleic expression in a biological sample isolated from a subject. In some embodiments, the one or more ICRs are selected from the group consisting of ICRs 1-1611 as defined herein.

[0054] Methods for producing nucleic acid arrays are known, and each of these can be employed to generate a nucleic acid array for use in the presently disclosed subject matter. Exemplary patents and patent applications that disclose nucleic acids arrays and their production include U.S. Patent Application Publication Nos. 2010/0056397, 2010/0304997, 2011/0105357, 2015/0232921 and U.S. Pat. Nos. 6,355,431; 6,429,027; 6,936,461; 7,824,917; 9,395,360; and 9,828,640, each of which is incorporated by reference herein in its entirety. See also Pirrung, 2002; Sandoval et al., 2011; Moran et al., 2016; and Krämer et al., 2019, each of which is incorporated by reference herein in its entirety.

[0055] In some embodiments, a nucleic acid array of the presently disclosed subject matter comprises, consists essentially of, or consists of a plurality of interrogatable nucleotide molecules that correspond to one or more of ICRs 1-1611. As used herein the phrase “interrogatable nucleotide molecules” refers to nucleic acids that are present on the nucleic acid array that can be used to determine the presence or absence of nucleic acids in a biological sample, which typically occurs by DNA-DNA hybridization. As such, in some embodiments the interrogatable nucleic acids present on the nucleic acid array are partially or completely single stranded such that single stranded regions of nucleic acids present in a biological sample can be hybridized thereto under various hybridization conditions (e.g., stringency conditions).

[0056] In the context of the nucleic acid arrays of the presently disclosed subject matter that can in some embodiments be employed to detect differential methylation of genomic DNA in a biological sample, in some embodiments the interrogatable nucleotide molecules comprise, consist essentially of, or consist of (a) target probes that comprise, consist essentially of, or consist of nucleotide sequences that are complementary to the nucleic acid sequences of ICRs 1-1611 or an informative subset thereof; and (b) target probes that comprise, consist essentially of, or consist of nucleotide sequences differ from (a) above and that are complementary to the nucleic acid sequences of ICRs 1-1611 or the informative subset thereof only subsequent to exposing the nucleic acid sequences of ICRs 1-1611 or the informative subset thereof to a bisulfite converting treatment.

[0057] As would be understood by one of ordinary skill in the art, methylation of genomic DNA at the C5 position of cytosines within CpG dinucleotides is associated with various epigenetic phenomena including, but not limited to gene expression, regulation of development, cellular proliferation and differentiation, and chromosome stability. The technique known as bisulfite sequencing takes advantage of the fact that cytosine can be reacted with sodium bisulfite, which deaminates the cytosine to a uracil molecule. C5-methylated cytosine, on the other hand, is insensitive to this reaction. As a consequence, single stranded DNA molecules that have been treated with sodium bisulfite will contain uracil nucleotides in place of unmethylated cytosines, and thus will hybridize to single stranded nucleic acids that have adenine in the corresponding location. In contrast, single stranded DNA molecules that have been treated with sodium bisulfite will retain unreacted C5-methyl cytosines, and thus will only hybridize to single stranded nucleic acids that have guanine in the corresponding location. As such, the presence or absence of cytosine methylation can be determined in DNA samples by treating said DNA samples with bisulfite followed by a relative quantification of hybridization of those treated molecules to single stranded nucleic acids that would be expected to hybridize only to DNA strands with uracils where (unmodified) cytosines had been present as compared to hybridization of treated molecules to single stranded nucleic acids that would be expected to hybridize to DNA strands with C5-methylated cytosines. In the latter case (i.e., to assay the presence of C5-methylated cytosine), those single stranded nucleic acids would be the exact reverse complements of the genomic DNA: i.e., would have guanines “across from” the C5-methylated cytosine in a double stranded molecule. In the case of unmethylated cytosines, however, the single stranded nucleic acids to which these molecules would hybridize would be the reverse complement of the genomic DNA but with an adenine rather than a guanine present in each location “across from” where an unmodified cytosine is present in the genomic DNA.

[0058] Therefore, with respect to the presently disclosed subject matter, the target probes that comprise, consist essentially of, or consist of nucleotide sequences that are complementary to the nucleic acid sequences of ICRs 1-1611 or an informative subset thereof of (a) above would be used to detect sites of C5 methylation of cytosine and the target probes that comprise, consist essentially of, or consist of nucleotide sequences that are different from (a) and are complementary only to the nucleic acid sequences of ICRs 1-1611 or the informative subset thereof subsequent to exposing the nucleic acid sequences of ICRs 1-1611 or the informative subset thereof to a bisulfite converting treatment of (b) above would be used to detect cytosines that are not C5 methylated.

[0059] Thus, in some embodiments the nucleic acid arrays of the presently disclosed subject matter include interrogatable nucleotide molecules that function as pairs: one member of the pair corresponding to a molecule that hybridizes to one or more of ICRs 1-1611 assuming the presence of one or more C5-methylated cytosines, and a second member of the pair including the same nucleotide sequence by with one or more guanosines replaced with adenosines.

[0060] In some embodiments, the interrogatable nucleotide molecules can be interrogated with human genomic DNA.

[0061] It is understood that the nucleic acid arrays of the presently disclosed subject matter need not include interrogatable nucleotide molecules that correspond to each and every one of ICRs 1-1611, however in some embodiments the presently disclosed subject matter encompasses interrogatable nucleotide molecules that correspond to each and every one of ICRs 1-1611. Accordingly, in some embodiments the nucleic acid arrays of the presently disclosed subject matter comprise, consist essentially of, or consist of interrogatable molecules that correspond to a subset of ICRs 1-1611. Any subset of ICRs 1-1611 can be included on a nucleic acid array of the presently disclosed subject matter. By way of example and not limitation, a nucleic acid array of the presently disclosed subject matter can include at least 5, 10, 25, 50, 100, 250, 500, 1000, or all of ICRs 1-1611, or any whole number between 1 and 1495.

[0062] In some embodiments, a nucleic acid array is designed for a specific application, for which particular subsets of ICRs 1-1611 might be desired while others would not be relevant. Such a particular subset that is relevant to a particular application is referred to herein as an “informative subset” of ICRs 1-1611. The precise nature of the “informative subset” can in some embodiments differ among various applications, and thus an “informative subset” is whatever subset of ICRs one might which to interrogate with respect to a particular disease, disorder, condition, or detection protocol.

### III. Methods

[0063] As set forth herein, the compositions (in some embodiments, the nucleic acid arrays) of the presently disclosed subject matter can be used to identify differences in DNA methylation of any DNA sample from any biological sample. The results of these identifications can be used for various purposes, including but not limited to those explicitly disclosed herein.

[0064] III.A. Methods for Identifying Imprinted Statuses of Genes in Subjects

[0065] For example, in some embodiments the presently disclosed subject matter relates to methods for determining an imprinting status of a gene or of a plurality of genes that is/are subject to parent-of-origin, monoalleleic expression in a subject. In some embodiments, the methods comprise, consist essentially of, or consist of providing a nucleic acid preparation isolated from a cell, tissue, or organ of the subject, wherein the nucleic acid preparation comprises genomic DNA sequences derived from both alleles of the gene and that correspond to one or more Imprint Control Regions (ICRs) selected from the group consisting of ICRs 1-1611 as disclosed herein; and identifying in the nucleic acid preparation the degree of and/or locations of methylation of both alleles of the gene with respect to the one or more ICRs, whereby an imprinting status of the gene in the subject is identified. In some embodiments, the subject is a human.

[0066] As used herein, the phrase “imprinting status” refers to a summary of one or more locations in a genomic DNA sample that are characterized by the presence or absence of C5-methylated cytosines. Thus, in some embodiments an imprinting status is a profile of the presence or absence of one or more C5-methylated cytosines at one or more locations. In some embodiments, an imprinting status is a profile of the presence of absence of a plurality of, in some embodiments, all C5-methylated cytosines at one or more locations. The imprinting status of a subject at a given time can be compared to a control. If the relevant inquiry with respect to a subject's imprinting status relates to that subject's imprinting status as compared to a population, then the subject's imprinting status can be compared to an imprinting status of the population. Because individual members of a population can differ in their individual imprinting statuses, a population's imprinting status to be employed as a control can in some embodiments be a summary of the most common C5-methylation patterns at individual locations, even though certain individuals in the population can differ from what is considered the population's imprinting status/profile.

[0067] Thus, in some embodiments a method for identifying an imprinted status of a gene subject to monoalleleic expression in a subject can comprise, consist essentially of, or consist of (a) hybridizing genomic DNA present in the nucleic acid preparation subsequent to a bisulfite converting treatment to the plurality of target probes present on a solid support, and further wherein the solid support comprises, consists essentially of, or consists of (i) target probes that comprise, consist essentially of, or consist of nucleotide sequences that are complementary to the nucleic acid sequences of ICRs 1-1611 or the informative subset of prior to the bisulfite converting treatment; (ii) target probes that comprise, consist essentially of, or consist of nucleotide sequences that are complementary to the nucleic acid sequences of ICRs 1-1611 or the informative subset of subsequent to the bisulfite converting treatment; and (c) calculating a methylation fraction of the genomic DNA present in the nucleic acid preparation by determining a ratio of hybridization of the target probes of (a) to the target probes of (b), wherein the ratio of hybridization provides a measure of the methylation fraction.

[0068] III.B. Methods for Detecting Presence of and/or Susceptibility to Medical Conditions Associated with Monoallelic Gene Expression in Subjects

[0069] In some embodiments, the presently disclosed subject matter also relates to methods for detecting a presence of and/or a susceptibility to a medical condition associated with monoallelic gene expression in a subject. Generally, the methods relate to identifying informative DNA methylation differences in a subject's DNA that are predictive of the presence of and/or a susceptibility to a medical condition associated with monoallelic gene expression. In some embodiments, the methods comprise (a) obtaining a biological sample from the subject, wherein the biological sample comprises one or more nucleic acid molecules that correspond to an Imprint Control Region (ICR) selected from the group consisting of ICRs 1-1611 or a subset thereof; (b) analyzing the one or more nucleic acid molecules to determine the DNA methylation status of one or both alleles of at least one imprinted gene associated with at least one of ICRs 1-1611; and (c) comparing the DNA methylation status of the one or both alleles of the at least one imprinted gene associated with the at least one of ICRs 1-1611 to a control DNA methylation status, wherein the comparing detects a presence of and/or a susceptibility to a medical condition associated with monoallelic gene expression in a subject. It is known in the art that certain medical conditions (e.g., a disease, disorder, or condition associated with a medical diagnosis) are associated with monoalleleic gene expression. Examples of such medical conditions include Prader_Willi syndrome (related to a cluster of genes on Chr 15:q11-13, including SNRPN, NDN, and multiple small nucleolar RNAs (SNORDs) in particular, and ICRs with coordinates/nucleotide positions on chromosome 15 of 23,647,239-23,648,622; 23,686,523-23,686,574; 23,758,904-23,759,277; 23,860,773-23,861,094; 23,897,271-23,897,645; 24,877,837-24,878,217; 24,954,592-24,956,828 of the human chromosome sequence set forth in Accession No. NC 000015.10 of the GENBANK® biosequence database), Angelman syndrome (related to the same Chr15:q11-q13 region as Prader-Willi syndrome, including UBE3A in particular, and the same ICRs), Silver-Russel syndrome and male infertility (related to H19 and IGF2, and ICRs on chromosome 11 with coordinates/nucleotide positions on chromosome 11 of 1,997,886-1,999,417; 1,999,793-2,000,383; 2,000,487-2,001,247; and 2,001,655-2,003,118 of the human chromosome sequence set forth in Accession No. NC 000011.10 of the GENBANK® biosequence database), Beckwith_Wiedemann syndrome (related to CDKN1C), Birk-Barel syndrome (related to KCNK9), preeclampsia and split hand-foot malformation (related to DLXS), retinoblastoma (related to RB1, and ICRs on chromosome 13 with coordinates/nucleotide positions 48,317,373-48,317,679 and 48,317,894-48,321,417 of the human chromosome sequence set forth in Accession No. NC_000013.11 of the GENBANK® biosequence database), breast and ovarian cancer (related to DIRAS3, on chromosome 1, coordinates/nucleotide positions 68,046,822-68,047,535; 68,049,858-68,051,097; and 68,051,239-68,051,861 of the human chromosome sequence set forth in Accession No. NC 000001.11 of the GENBANK® biosequence database). All coordinates given are from human genome build 38, which correspond to the Accession NOs: summarized in Table 1.

TABLE 1
Accession NOs. for Human Chromosomal Sequences in
the GENBANK ® Biosequence Database

| | | | |
|---|---|---|---|
| Human Chromosome 1 | NC_000001.11 | Human Chromosome 2 | NC_000002.12 |
| Human Chromosome 3 | NC_000003.12 | Human Chromosome 4 | NC_000004.12 |
| Human Chromosome 5 | NC_000005.10 | Human Chromosome 6 | NC_000006.12 |
| Human Chromosome 7 | NC_000007.14 | Human Chromosome 8 | NC_000008.11 |
| Human Chromosome 9 | NC_000009.12 | Human Chromosome 10 | NC_000010.11 |
| Human Chromosome 11 | NC_000011.10 | Human Chromosome 12 | NC_000012.12 |
| Human Chromosome 13 | NC_000013.11 | Human Chromosome 14 | NC_000014.9 |
| Human Chromosome 15 | NC_000015.10 | Human Chromosome 16 | NC_000016.10 |
| Human Chromosome 17 | NC_000017.11 | Human Chromosome 18 | NC_000018.10 |
| Human Chromosome 19 | NC_000019.10 | Human Chromosome 20 | NC_000020.11 |
| Human Chromosome 21 | NC_000021.9 | Human Chromosome 22 | NC_000022.11 |
| Human Chromosome X | NC_000023.11 | Human Chromosome Y | NC_000024.10 |

[0070] Another medical condition that is associated with the expression of particular genes, some of which have been shown to be associated by monoallelic expression, is autism. 1,904 associated genes have been reported (1,875 from the ENSEMBL hg38; see also Li et al., 2020). 82 of these autism-associated genes are within 10 kb of an ICR, and are summarized in Table 2.

TABLE 2
Exemplary Genetic Loci Associated with Autism and that are Within 10 kb of an ICR

| | | Ensembl Gene | Human | | |
|---|---|---|---|---|---|
| Symbol | ICR No.^{a} | Accession No. | Chromosome | Start^{b} | End^{b} |
| SAMD11 | ICR_5 | ENSG00000187634 | 1 | 923,928 | 944,581 |
| B3GALT6 | ICR_7 | ENSG00000176022 | 1 | 1,232,265 | 1,235,041 |
| LAMB3 | ICR_82 | ENSG00000196878 | 1 | 209,614,870 | 209,652,466 |
| SRD5A2 | ICR_636 | ENSG00000277893 | 2 | 31,522,480 | 31,581,067 |
| RUVBL1 | ICR_978 | ENSG00000175792 | 3 | 128,064,778 | 128,153,914 |
| TERT | ICR_1063 | ENSG00000164362 | 5 | 1,253,147 | 1,295,069 |
| TERT | ICR_1062 | ENSG00000164362 | 5 | 1,253,147 | 1,295,069 |
| DHFR | ICR_1080 | ENSG00000228716 | 5 | 80,626,228 | 80,654,983 |
| NR2F1 | ICR_1082 | ENSG00000175745 | 5 | 93,583,337 | 93,594,615 |
| PCDHA1 | ICR_1089 | ENSG00000204970 | 5 | 140,786,136 | 141,012,347 |
| PCDHA1 | ICR_1090 | ENSG00000204970 | 5 | 140,786,136 | 141,012,347 |
| PCDHA1 | ICR_1091 | ENSG00000204970 | 5 | 140,786,136 | 141,012,347 |
| PCDHA1 | ICR_1092 | ENSG00000204970 | 5 | 140,786,136 | 141,012,347 |
| PCDHA1 | ICR_1093 | ENSG00000204970 | 5 | 140,786,136 | 141,012,347 |
| PCDHA1 | ICR_1094 | ENSG00000204970 | 5 | 140,786,136 | 141,012,347 |
| PCDHA1 | ICR_1095 | ENSG00000204970 | 5 | 140,786,136 | 141,012,347 |
| PCDHA1 | ICR_1096 | ENSG00000204970 | 5 | 140,786,136 | 141,012,347 |
| PCDHA2 | ICR_1090 | ENSG00000204969 | 5 | 140,794,852 | 141,012,344 |
| PCDHA2 | ICR_1091 | ENSG00000204969 | 5 | 140,794,852 | 141,012,344 |
| PCDHA2 | ICR_1092 | ENSG00000204969 | 5 | 140,794,852 | 141,012,344 |
| PCDHA2 | ICR_1093 | ENSG00000204969 | 5 | 140,794,852 | 141,012,344 |
| PCDHA2 | ICR_1094 | ENSG00000204969 | 5 | 140,794,852 | 141,012,344 |
| PCDHA2 | ICR_1095 | ENSG00000204969 | 5 | 140,794,852 | 141,012,344 |
| PCDHA2 | ICR_1096 | ENSG00000204969 | 5 | 140,794,852 | 141,012,344 |
| PCDHA2 | ICR_1089 | ENSG00000204969 | 5 | 140,794,852 | 141,012,344 |
| PCDHA3 | ICR_1090 | ENSG00000255408 | 5 | 140,801,028 | 141,012,344 |
| PCDHA3 | ICR_1091 | ENSG00000255408 | 5 | 140,801,028 | 141,012,344 |
| PCDHA3 | ICR_1092 | ENSG00000255408 | 5 | 140,801,028 | 141,012,344 |
| PCDHA3 | ICR_1093 | ENSG00000255408 | 5 | 140,801,028 | 141,012,344 |
| PCDHA3 | ICR_1094 | ENSG00000255408 | 5 | 140,801,028 | 141,012,344 |
| PCDHA3 | ICR_1095 | ENSG00000255408 | 5 | 140,801,028 | 141,012,344 |
| PCDHA3 | ICR_1096 | ENSG00000255408 | 5 | 140,801,028 | 141,012,344 |
| PCDHA4 | ICR_1091 | ENSG00000204967 | 5 | 140,806,929 | 141,012,344 |
| PCDHA4 | ICR_1092 | ENSG00000204967 | 5 | 140,806,929 | 141,012,344 |
| PCDHA4 | ICR_1093 | ENSG00000204967 | 5 | 140,806,929 | 141,012,344 |
| PCDHA4 | ICR_1094 | ENSG00000204967 | 5 | 140,806,929 | 141,012,344 |
| PCDHA4 | ICR_1095 | ENSG00000204967 | 5 | 140,806,929 | 141,012,344 |
| PCDHA4 | ICR_1096 | ENSG00000204967 | 5 | 140,806,929 | 141,012,344 |
| PCDHA4 | ICR_1090 | ENSG00000204967 | 5 | 140,806,929 | 141,012,344 |
| PCDHA5 | ICR_1093 | ENSG00000204965 | 5 | 140,821,604 | 141,012,344 |
| PCDHA5 | ICR_1094 | ENSG00000204965 | 5 | 140,821,604 | 141,012,344 |
| PCDHA5 | ICR_1095 | ENSG00000204965 | 5 | 140,821,604 | 141,012,344 |
| PCDHA5 | ICR_1096 | ENSG00000204965 | 5 | 140,821,604 | 141,012,344 |
| PCDHA6 | ICR_1093 | ENSG00000081842 | 5 | 140,827,958 | 141,012,344 |
| PCDHA6 | ICR_1094 | ENSG00000081842 | 5 | 140,827,958 | 141,012,344 |
| PCDHA6 | ICR_1095 | ENSG00000081842 | 5 | 140,827,958 | 141,012,344 |
| PCDHA6 | ICR_1096 | ENSG00000081842 | 5 | 140,827,958 | 141,012,344 |
| PCDHA7 | ICR_1094 | ENSG00000204963 | 5 | 140,834,248 | 141,012,344 |
| PCDHA7 | ICR_1095 | ENSG00000204963 | 5 | 140,834,248 | 141,012,344 |
| PCDHA7 | ICR_1096 | ENSG00000204963 | 5 | 140,834,248 | 141,012,344 |
| PCDHA7 | ICR_1093 | ENSG00000204963 | 5 | 140,834,248 | 141,012,344 |
| PCDHA9 | ICR_1094 | ENSG00000204961 | 5 | 140,847,463 | 141,012,344 |
| PCDHA9 | ICR_1095 | ENSG00000204961 | 5 | 140,847,463 | 141,012,344 |
| PCDHA9 | ICR_1096 | ENSG00000204961 | 5 | 140,847,463 | 141,012,344 |
| PCDHA10 | ICR_1094 | ENSG00000250120 | 5 | 140,855,883 | 141,012,344 |
| PCDHA10 | ICR_1095 | ENSG00000250120 | 5 | 140,855,883 | 141,012,344 |
| PCDHA10 | ICR_1096 | ENSG00000250120 | 5 | 140,855,883 | 141,012,344 |
| PCDHA11 | ICR_1095 | ENSG00000249158 | 5 | 140,868,183 | 141,012,344 |
| PCDHA11 | ICR_1096 | ENSG00000249158 | 5 | 140,868,183 | 141,012,344 |
| PCDHA12 | ICR_1095 | ENSG00000251664 | 5 | 140,875,302 | 141,012,344 |
| PCDHA12 | ICR_1096 | ENSG00000251664 | 5 | 140,875,302 | 141,012,344 |
| PCDHA13 | ICR_1096 | ENSG00000239389 | 5 | 140,882,208 | 141,012,344 |
| PCDHA13 | ICR_1095 | ENSG00000239389 | 5 | 140,882,208 | 141,012,344 |
| ZNF311 | ICR_1143 | ENSG00000197935 | 6 | 28,994,785 | 29,005,316 |
| ZNF311 | ICR_1142 | ENSG00000197935 | 6 | 28,994,785 | 29,005,316 |
| DXO | ICR_1148 | ENSG00000204348 | 6 | 31,969,810 | 31,972,292 |
| DLL1 | ICR_1183 | ENSG00000198719 | 6 | 170,282,206 | 170,306,565 |
| FAM120B | ICR_1183 | ENSG00000112584 | 6 | 170,290,703 | 170,407,065 |
| GRB10 | ICR_1215 | ENSG00000106070 | 7 | 50,590,063 | 50,793,462 |
| LAMB1 | ICR_1240 | ENSG00000091136 | 7 | 107,923,799 | 108,003,255 |
| DPP6 | ICR_1251 | ENSG00000130226 | 7 | 153,887,097 | 154,894,285 |
| HTR5A | ICR_1252 | ENSG00000157219 | 7 | 155,070,324 | 155,085,749 |
| ARHGEF10 | ICR_1268 | ENSG00000104728 | 8 | 1,823,976 | 1,958,641 |
| SOX7 | ICR_1272 | ENSG00000171056 | 8 | 10,723,768 | 10,730,512 |
| EGR3 | ICR_1277 | ENSG00000179388 | 8 | 22,687,659 | 22,693,302 |
| CHRNA2 | ICR_1279 | ENSG00000120903 | 8 | 27,459,761 | 27,479,883 |
| CHRNA2 | ICR_1278 | ENSG00000120903 | 8 | 27,459,761 | 27,479,883 |
| PRKDC | ICR_1289 | ENSG00000253729 | 8 | 47,773,108 | 47,960,183 |
| KHDRBS3 | ICR_1308 | ENSG00000131773 | 8 | 135,457,457 | 135,656,722 |
| FOCAD | ICR_1321 | ENSG00000188352 | 9 | 20,658,309 | 20,995,955 |
| GSN | ICR_1372 | ENSG00000148180 | 9 | 121,207,794 | 121,332,843 |
| GRIN1 | ICR_1387 | ENSG00000176884 | 9 | 137,138,390 | 137,168,762 |
| CACNB2 | ICR_121 | ENSG00000165995 | 10 | 18,140,677 | 18,541,869 |
| PTCHD3 | ICR_124 | ENSG00000182077 | 10 | 27,398,187 | 27,414,368 |
| KIF11 | ICR_151 | ENSG00000138160 | 10 | 92,593,286 | 92,655,395 |
| EXOC6 | ICR_152 | ENSG00000138190 | 10 | 92,834,713 | 93,059,493 |
| EBF3 | ICR_169 | ENSG00000108001 | 10 | 129,835,283 | 129,963,841 |
| BRSK2 | ICR_196 | ENSG00000174672 | 11 | 1,389,899 | 1,462,689 |
| KCTD21 | ICR_224 | ENSG00000188997 | 11 | 78,171,249 | 78,188,822 |
| KRT83 | ICR_263 | ENSG00000170523 | 12 | 52,314,301 | 52,321,398 |
| PCCA | ICR_312 | ENSG00000175198 | 13 | 100,089,015 | 100,530,437 |
| ITPK1 | ICR_343 | ENSG00000100605 | 14 | 92,936,914 | 93,116,320 |
| C14orf2 | ICR_355 | ENSG00000156411 | 14 | 103,912,288 | 103,928,269 |
| MAGEL2 | ICR_368 | ENSG00000254585 | 15 | 23,643,544 | 23,647,841 |
| SNRPN | ICR_373 | ENSG00000128739 | 15 | 24,823,637 | 24,978,723 |
| SNRPN | ICR_374 | ENSG00000128739 | 15 | 24,823,637 | 24,978,723 |
| APBA2 | ICR_376 | ENSG00000034053 | 15 | 28,884,483 | 29,118,315 |
| C15orf62 | ICR_379 | ENSG00000188277 | 15 | 40,770,080 | 40,772,449 |
| TSC2 | ICR_403 | ENSG00000103197 | 16 | 2,047,465 | 2,088,720 |
| CNGB1 | ICR_445 | ENSG00000070729 | 16 | 57,882,340 | 57,971,116 |
| INPP5K | ICR_462 | ENSG00000132376 | 17 | 1,494,571 | 1,516,888 |
| PAFAH1B1 | ICR_465 | ENSG00000007168 | 17 | 2,593,210 | 2,685,615 |
| SLC25A39 | ICR_495 | ENSG00000013306 | 17 | 44,319,625 | 44324,870 |
| C3 | ICR_561 | ENSG00000125730 | 19 | 6,677,704 | 6,730,562 |
| MAST1 | ICR_568 | ENSG00000105613 | 19 | 12,833,951 | 12,874,951 |
| PGLYRP2 | ICR_573 | ENSG00000161031 | 19 | 15,468,645 | 15,498,956 |
| PLCB1 | ICR_714 | ENSG00000182621 | 20 | 8,077,251 | 8,968,360 |
| L3MBTL1 | ICR_755 | ENSG00000185513 | 20 | 43,507,680 | 43,550,950 |
| ZNF335 | ICR_759 | ENSG00000198026 | 20 | 45,948,653 | 45,972,172 |
| GNAS | ICR_766 | ENSG00000087460 | 20 | 58,839,718 | 58,911,192 |
| GNAS | ICR_767 | ENSG00000087460 | 20 | 58,839,718 | 58,911,192 |
| GNAS | ICR_768 | ENSG00000087460 | 20 | 58,839,718 | 58,911,192 |
| GNAS | ICR_769 | ENSG00000087460 | 20 | 58,839,718 | 58,911,192 |
| KCNQ2 | ICR_777 | ENSG00000075043 | 20 | 63,400,210 | 63,472,677 |
| KCNQ2 | ICR_778 | ENSG00000075043 | 20 | 63,400,210 | 63,472,677 |
| EEF1A2 | ICR_778 | ENSG00000101210 | 20 | 63,488,013 | 63,499,315 |
| MICAL3 | ICR_914 | ENSG00000243156 | 22 | 17,787,649 | 18,024,559 |
| TBX1 | ICR_918 | ENSG00000184058 | 22 | 19,756,703 | 19,783,593 |
| TBX1 | ICR_917 | ENSG00000184058 | 22 | 19,756,703 | 19,783,593 |
| MAPK1 | ICR_920 | ENSG00000100030 | 22 | 21,754,500 | 21,867,680 |
| UPB1 | ICR_923 | ENSG00000100024 | 22 | 24,494,107 | 24,528,390 |
| TNRC6B | ICR_935 | ENSG00000100354 | 22 | 40,044,817 | 40,335,808 |
| MAP3K15 | ICR_1404 | ENSG00000180815 | X | 19,360,056 | 19,515,261 |
| CNKSR2 | ICR_1406 | ENSG00000149970 | X | 21,374,418 | 21,654,695 |
| USP9X | ICR_1415 | ENSG00000124486 | X | 41,085,635 | 41,236,579 |
| ELK1 | ICR_1418 | ENSG00000126767 | X | 47,635,521 | 47,650,604 |
| HDAC6 | ICR_1419 | ENSG00000094631 | X | 48,801,377 | 48,824,982 |
| CACNA1F | ICR_1423 | ENSG00000102001 | X | 49,205,063 | 49,233,371 |
| TAF1 | ICR_1436 | ENSG00000147133 | X | 71,366,239 | 71,532,374 |
| KIAA1210 | ICR_1456 | ENSG00000250423 | X | 119,078,635 | 119,150,579 |
| IDS | ICR_1473 | ENSG00000010404 | X | 149,476,990 | 149,521,096 |
| MECP2 | ICR_1482 | ENSG00000169057 | X | 154,021,573 | 154,137,103 |
| MECP2 | ICR_1481 | ENSG00000169057 | X | 154,021,573 | 154,137,103 |
| RPL10 | ICR_1483 | ENSG00000147403 | X | 154,389,955 | 154,409,168 |
| RPL10 | ICR_1484 | ENSG00000147403 | X | 154,389,955 | 154,409,168 |
| RPL10 | ICR_1485 | ENSG00000147403 | X | 154,389,955 | 154,409,168 |

^{a}The ICR number listed is also the SEQ ID NO: in the Sequence Listing. For example, “ICR_5” corresponds to SEQ ID NO: 5, “ICR_373” corresponds to SEQ ID NO: 373, etc.
^{b}The start and end positions correspond to the nucleotide number in the corresponding chromosomal sequences of the Homo sapiens GRCh38.p13 Primary Assembly as set forth in the GENBANK ® biosequence database.

[0071] Another medical condition that is associated with the expression of particular genes, some of which have been shown to be associated by monoallelic expression, is schizophrenia. Genes that are associated with schizophrenia and are located within 10 kb of one or more of ICRs 1-1611 include but are not limited to those set forth in Table 3.

TABLE 3
Exemplary Genetic Loci Associated with Schizophrenia
and that are Within 10 kb of an ICR

| | | Ensembl Gene | Human | | |
|---|---|---|---|---|---|
| Symbol | ICR No.^{a} | Accession No. | Chromosome | Start^{b} | End^{b} |
| CAMTA1 | ICR_16 | ENSG00000171735 | 1 | 6,785,324 | 7,769,706 |
| TDRD5 | ICR_176 | ENSG00000162782 | 1 | 179,591,613 | 179,691,272 |
| SEMA3F | ICR_206 | ENSG00000001617 | 3 | 50,155,045 | 50,189,075 |
| ADRA2C | ICR_246 | ENSG00000184160 | 4 | 3,766,348 | 3,768,526 |
| KIF25 | ICR_417 | ENSG00000125337 | 6 | 167,996,241 | 168,045,089 |
| PLXNA4 | ICR_482 | ENSG00000221866 | 7 | 132,123,332 | 132,648,688 |
| PTK2B | ICR_517 | ENSG00000120899 | 8 | 2,7311,482 | 27,459,391 |
| TRAPPC9 | ICR_548 | ENSG00000167632 | 8 | 139,730,343 | 140,458,579 |
| TRAPPC9 | ICR_549 | ENSG00000167632 | 8 | 139,730,343 | 140,458,579 |
| FAM157B | ICR_629 | ENSG00000233013 | 9 | 138,216,187 | 138,252,994 |
| PDXDC1 | ICR_930 | ENSG00000179889 | 16 | 14,974,591 | 15,139,339 |
| ABCC3 | ICR_1020 | ENSG00000108846 | 17 | 50,634,777 | 50,692,252 |
| SEPT9 | ICR_1026 | ENSG00000184640 | 17 | 77,280,569 | 77,500,596 |
| MKNK2 | ICR_1063 | ENSG00000099875 | 19 | 2,037,465 | 2,051,244 |
| AP3D1 | ICR_1064 | ENSG00000065000 | 19 | 2,100,988 | 2,164,465 |
| SIGLEC9 | ICR_1133 | ENSG00000129450 | 19 | 51,124,908 | 51,136,651 |
| NHS | ICR_1400 | ENSG00000188158 | X | 17,375,420 | 17,735,994 |
| IGSF1 | ICR_1466 | ENSG00000147255 | X | 131,273,506 | 131,578,899 |
| MECP2 | ICR_1480 | ENSG00000169057 | X | 154,021,573 | 154,137,103 |
| MECP2 | ICR_1481 | ENSG00000169057 | X | 154,021,573 | 154,137,103 |

^{a}The ICR number listed is also the SEQ ID NO: in the Sequence Listing. For example, “ICR_16” corresponds to SEQ ID NO: 16, “ICR_206” corresponds to SEQ ID NO: 206, etc.
^{b}The start and end positions correspond to the nucleotide number in the corresponding chromosomal sequences of the Homo sapiens GRCh38.p13 Primary Assembly as set forth in the GENBANK ® biosequence database.

[0072] By way of further example and not limitation, the field of hepatology is in an intense search for biomarkers for liver cancer diagnostics and prediction in circulation (so called liquid biopsies) because unlike other cancers, tissue specimens are not available, as the vast majority are diagnosed by radiographic imaging. Hypermethylation of the ICR at the DLK1/MEG3 imprinted domain occurs frequently enough that it is widely proposed as a biomarker for a poorer prognosis among liver cancer cases (presumably via inactivation of the tumor suppressor MEG3 and other genes in this gene cluster). A persistent relationship between hypermethylation of the MEG3 sequence region and cadmium exposure has been reported, which is highly suspected to contribute to liver cancers in general, and may drive some of the increase in the incidence of hepatocellular carcinoma, specifically. In untargeted analyses based on whole genome bisulfite sequencing of liver tumors and adjacent tissues, we report that of the differentially methylated regions found between tumor and normal liver tissue, 548 overlap candidate ICRs, and 146 of those overlap annotated transcripts. In relation to autism, 1,904 associated genes have been reported (1,875 from the ENSEMBL hg38 version; see also Li et al., 2020). We found that 82 of the autisms-related genes are within 10kb of the ICRs. The list of the 82 genes is attached.

[0073] In some embodiments, a pattern of methylation of ICRs that is associated with a disease such as autism, early onset liver cancer or other subtype, e.g., hepatocellular- or cholangio-carcinoma, can be developed into a panel. Such a panel of methylation patterns can then be multiplexed and used to detect the presence/absence of disease, or prognosis, for example, if a certain threshold of the number of differentially methylated regions is reached. Similar sequencing technologies have been developed for cervical intra-epithelial neoplasia, where the presence or absence oncogenic human papilloma virus (HPV) viral DNA sequences is used to triage patients for further work-up. Once the biological sample is isolated from a subject and used to interrogate the array, the data that is returned can be compared to one or more profiles previously established for diseases (which in some embodiments can be a continually expanding process), with prognosis for disease susceptibility based on matching known profiles.

[0074] In some embodiments, a DNA methylation status comprises one or more epigenomic features of at least one imprinted gene. By way of example and not limitation, the one or more epigenomic features can comprise a methylation profile of the subject with respect to at least one imprinted gene. Also, by way of example and not limitation, the one or more epigenomic features are selected from the group consisting of a DNA sequence methylation state, a nucleosome positioning feature, and a histone modification.

[0075] Genes for which expression is associated with medical conditions can include genes that are aberrantly upregulated or downregulated, with the aberrant upregulation or downregulation occurring in a temporal, cell type-specific, organ type-specific, and/or tissue-specific manner. By way of example and not limitation, it is known that monoallelic gene expression is particularly relevant to proper development of mammals. In some embodiments, this monoallelic gene expression persists from very early development (e.g., is already specified in the one cell fertilized embryo or soon thereafter during embryogenesis).

[0076] It is also known that modifications of DNA methylation can change as a subject ages, and in some embodiments these changes either result in or can be enhanced by disease processes. Specific DNA methylation differences can thus include one or more epigenomic features that relates to a gene for which expression or lack of expression is associated with the medical condition. The identification of ICRs 1-1611 as set forth herein has thus enhanced the ability to correlate express or lack of expression of imprinted gene with particular medical conditions.

[0077] In some embodiments, the medical condition is Alzheimer's disease (AD). Using AD solely as a representative medical condition, in some embodiments the presently disclosed subject matter relates to methods for detecting a presence of and/or a susceptibility to AD. In some embodiments, at least one imprinted gene is thus a gene that is associated with Alzheimer's disease. In some embodiments, genes that are in proximity to a genetic locus that is associated with certain epigenomic features, correlated expression in association to epigenomic features, or reported association to Alzheimer disease in combination with either of the first two criteria can be identified that relate to AD development and/or progression. Particularly where changes in imprinting status of one or more genes and/or one or more ICRs associated with those one or more genes that themselves are associated with AD development and/or progression can be detected, said changes in imprinting status can be employed to detect a presence of and/or a susceptibility to AD. A kinase anchor protein 2 (AKAP) is shown as an example of ICRs region that overlap with DMR identified in AD patient. This gene was associated with AD disease in GWAS studies (Poelmans et al., 2013). The regulatory mechanism behind this association is not fully known. In some embodiments, an imprinting status of one or more of ICRs 1-1611 and/or the genomic regions associated with SEQ ID NOs: 1612-1816 is determined for a subject and compared to an imprinting status of the same one or more of ICRs of an appropriate control group, which in some embodiments can be a control group that has been shown to not develop AD.

[0078] In some embodiments, in view of the fact that imprinting status can be specified very early in development, it is even possible to detect a presence of and/or a susceptibility to a medical condition associated with monoallelic expression in a subject at a time that is long before any symptoms develop in the subject. In this regard, the compositions and methods of the presently disclosed subject matter provide a significant advantage over RNA-based gene expression analysis in that imprinting statuses can be set long before any relevant gene expression must occur. For example, a susceptibility to a late onset medical condition can be detected decades before the medical condition manifests itself in a subject because the imprinting status that is associated with the medical condition exists when the subject is born (in fact, earlier).

[0079] Another advantage of the presently disclosed compositions and methods is that they rely on interrogatable characteristics of subjects that are generally not cell-type, tissue-type, or organ-type specific, and thus any biological sample that can be isolated from a subject can be assayed. Typically, differences in gene expression must be assayed at a time and in a cell, tissue, and/or organ where the gene expression differences take place. It is not the case that such a cell, tissue, or organ can always be biopsied (e.g., for neurological diseases), nor is it generally preferable to have to wait for an onset of symptoms to perform the gene expression analysis even in accessible cells, organs, or tissues as the changes in gene expression might be causative of the medical condition. The presently disclosed compositions and methods provide for analysis of any cell, tissue, or organ, and including cells, tissues, and organs that are unaffected and/or will be unaffected by the medical condition, such as but not limited to a blood sample, that can be isolated at any stage of development (e.g., from a newborn, a young child, and/or from an adult). Thus, in some embodiments the presently disclosed compositions and methods provide for diagnosis of medical conditions at much earlier stages (including but not limited to times longer before a medical condition occurs or worsens) using biological samples that themselves need not be affected by the medical condition.

[0080] As such, in some embodiments the presently disclosed subject matter relates to methods for predicting a susceptibility to future development of a medical condition associated with monoallelic expression in a subject prior to the onset of any symptoms of the medical condition in the subject. In some embodiments, the methods comprise, consist essentially of, or consist of (a) obtaining a biological sample from the subject, wherein the biological sample comprises one or more nucleic acid molecules that correspond to an Imprint Control Region (ICR) selected from the group consisting of ICRs 1-1611 or a subset thereof; (b) analyzing the one or more nucleic acid molecules to determine the DNA methylation status of one or both alleles of at least one imprinted gene associated with at least one of ICRs 1-1611; and (c) determining whether the DNA methylation status determined correlates with future development of the medical condition, whereby a susceptibility to future development of the medical condition is predicted. In some embodiments, the biological sample comprises genomic DNA isolated from any cell, tissue, or organ of the subject, including a cell, tissue, or organ that is generally unaffected in subjects who have the medical condition, and not necessarily usable for diagnosis of conditions affecting target tissues by means specific to those affected tissues, including, but not limited to, physical morphology, immunological assays, protein expression, or RNA expression.

[0081] III.C. Methods for Monitoring the Progression of Medical Conditions Associated with Monoallelic Gene Expression in Subjects

[0082] It is noted that not all medical conditions associated with monoallelic expression are caused by static imprinting statuses specified early in development. Certain medical conditions arise form undesirable changes in the imprinting status of one or more genes associated with the medical condition, which in some embodiments can be reflected in changes in the methylation of one or more of ICRs 1-1611. In such a case, it is possible to employ the compositions and methods of the presently disclosed subject matter to monitor progression of a medical condition by detecting changes that occur in the methylation of one or more of ICRs 1-1611 in a subject over time.

[0083] Thus, in some embodiments the presently disclosed subject matter relates to methods for monitoring the progression of a medical condition associated with monoallelic expression in a subject, wherein the methods comprise, consist essentially of, or consist of (a) obtaining a biological sample from the subject, wherein the biological sample comprises one or more nucleic acid molecules that correspond to an Imprint Control Region (ICR) selected from the group consisting of ICRs 1-1611 or a subset thereof; (b) analyzing the one or more nucleic acid molecules to determine the DNA methylation status of one or both alleles of at least one imprinted gene associated with at least one of ICRs 1-1611; (c) identifying one or more changes that have occurred in the DNA methylation status of the ICRs analyzed in the subject; and (d) determining of the one or more changes identified correlate with a progression of or an improvement in at least one symptom of the medical condition, wherein the determining step provides monitoring of the progression of the medical condition associated with monoallelic expression in the subject. In some embodiments, the identifying comprises comparing a first methylation status with respect to the at least one of ICRs 1-1611 in the subject to a second, subsequent methylation status with respect to the at least one of ICRs 1-1611 in the subject, wherein the comparing provides an indication of the second, subsequent methylation becoming more or less similar to the methylation status with respect to the at least one of ICRs 1-1611 in normal subjects.

[0084] III.D. Methods for Monitoring Treatments of Medical Conditions Associated with Monoallelic Gene Expression in Subjects

[0085] Similarly, in some embodiments the presently disclosed subject matter relates to methods for monitoring treatments for medical conditions associated with monoallelic expression in subjects. In some embodiments, the methods comprise, consist essentially of, or consist of (a) obtaining a biological sample from the subject, wherein the biological sample comprises one or more nucleic acid molecules that correspond to an Imprint Control Region (ICR) selected from the group consisting of ICRs 1-1611 or a subset thereof; (b) analyzing the one or more nucleic acid molecules to determine the DNA methylation status of one or both alleles of at least one imprinted gene associated with at least one of ICRs 1-1611; (c) identifying one or more changes that have occurred in the DNA methylation status of the ICRs analyzed in the subject subsequent to treatment versus prior to treatment or prior to a specific treatment occurrence; and (d) determining of the one or more changes identified correlate with a progression of or an improvement in at least one symptom of the medical condition, wherein the determining step provides monitoring of the effectiveness or lack thereof of the treatment of the medical condition associated with monoallelic expression in the subject. In some embodiments, the identifying comprises comparing a first methylation status with respect to the at least one of ICRs 1-1611 in the subject to a second, subsequent methylation status with respect to the at least one of ICRs 1-1611 in the subject, wherein the comparing provides an indication of the second, subsequent methylation becoming more or less similar to the methylation status with respect to the at least one of ICRs 1-1611 in normal subjects. In some embodiments, the first methylation status is determined prior to the initiation of any treatment, prior to the initiation of a new treatment, and/or prior to the administration of a subsequent treatment. In some embodiments, the second methylation status is determined after the initiation of the first treatment or any subsequent treatment.

[0086] Thus, in some embodiments the second methylation status and the first methylation status relate to a subject that has undergone no additional treatment since the first methylation status was determined, and the second methylation status reflects only the passage of time during which the first treatment has been acting. However, in some embodiments at least one difference in treatment between the first and second methylation status determinations, whether that one difference is a new treatment, a subsequent administration of the same treatment, and/or a change in the nature of the treatment (e.g., a modification of dose, administration frequency, and/or route of administration, etc.).

[0087] In some embodiments, the treatment being monitored is a standard treatment designed to modify one or more symptoms of the medical condition and thus is not designed to directly modify the methylation status of any genetic locus associated with monoallelic expression in a subject. However, in some embodiments the treatment being monitored is designed to directly modulate the methylation status of at least one genetic locus associated with the medical condition. By way of example and not limitation, in some embodiments the treatment is designed to directly reverse some undesirable methylation difference that has occurred in a gene associated with a medical condition, wherein the deleterious methylation difference gives rise to and/or exacerbates at least one symptom, characteristic, or feature of the medical condition.

[0088] Stated another way, in those embodiments where a difference in methylation status of a genetic locus associated with a medical condition (e.g., one or more of ICRs 1-1611) bears a causal relationship to at least one symptom, characteristic, or feature of the medical condition, a treatment can be devised to “reverse” or “normalize” the methylation status of a genetic locus in order to decrease or eliminate the consequence of the deleterious methylation difference. The compositions and methods of the presently disclosed subject matter can be employed to detect these deleterious differences and monitor any changes that occur in the methylation statuses in relevant subjects, such as but not limited to changes that occur in the methylation statuses of one or more of ICRs 1-1611 in subjects.

[0089] III.E. Methods for Preventing Development of and/or Treating Medical Conditions Associated with Monoallelic Gene Expression in Subjects

[0090] Accordingly, in some embodiments the presently disclosed subject matter also relates to methods for preventing development of and/or treating medical conditions associated with undesirable changes in methylation statuses of genetic loci associated with monoallelic gene expression in subjects by directly modifying genomic DNA, particularly with respect to methylation statuses. In this regard, when changes in methylation status of relevant genetic loci occur or are specified in a particular individual, altering those methylation statuses by direct modification of genomic DNA should prevent development of the medical condition and/or ameliorate at last one symptom, characteristic, or feature of the medical condition. By way of example and not limitation, direct genomic DNA modifications can be induced using the CRISPR/Cas system as described, for example, in U.S. Pat. Nos. 8,697,359 and 9,688,971, both of which are incorporated by reference herein in their entireties.

### EXAMPLES

[0091] The following EXAMPLES as set forth herein have been presented for purposes of illustration and description. These EXAMPLES are not intended to limit the disclosure to the form disclosed herein, as variations and modifications commensurate with the teachings of the description of the disclosure, and the skill or knowledge of the relevant art, are within the scope as set forth herein. It is intended that the appended claims be construed to include alternative embodiments to the extent permitted by the prior art.

[0092] Without further description, it is believed that one of ordinary skill in the art can, using the preceding description and the following illustrative EXAMPLES, make and utilize the compounds of the presently disclosed subject matter and practice the methods of the presently disclosed subject matter. The following EXAMPLES therefore particularly point out embodiments of the presently disclosed subject matter and are not to be construed as limiting in any way the remainder of the disclosure.

### Introduction to the Examples

[0093] Data accumulated over the last two decades support the fetal origins of adult disease susceptibility hypothesis, and increasingly, the mediating role of epigenetic mechanisms. This implies that implicated epigenetic marks can be developed into screening tools to predict future risk of disease. However, epigenetic marks identified in accessible tissues like peripheral blood do not always correlate with those of inaccessible tissues relevant to the disease under study, and they may also be epiphenomena, i.e., being altered by disease.

[0094] Data were collected to characterize parent-of-origin differential methylation consistent with imprint control regions (ICRs) that regulate monoalleleic gene expression of developmentally significant genes; and to identify ICRs associated with Alzheimer's disease (AD) in African Americans and European Americans.

[0095] Whole genome bisulfite sequencing (WGBS) and pyrosequencing were employed to sequence DNA derived from the endodermal, mesodermal, and ectodermal germ layers, the gametes and accessible CD14—and human umbilical cord vein endothelial cells and developed a pipeline to identify putative ICRs. The overlap of ICRs with differentially methylated regions (DMRs) from frontal cortex-derived DNA from Alzheimer's disease (AD) cases and controls was then assessed.

[0096] From DNA obtained from multiple ethnic groups, 1,495 human ICRs were identified, including the 24 already characterized, and validated a subset in multiple accessible and inaccessible tissues. The average ICR contains 23 CG dinucleotides, and ranges from 13 to ˜4,000 bp, in general, larger than previously characterized ICRs. In frontal cortex-derived DNA from cases and controls, 31,600 differentially methylated regions (DMRs) were associated with AD in AAs (p<1.70×10⁻⁶¹), and 740 associated in EAs (p<1.50×10⁻⁹⁰, a more than 40-fold difference, with 89 regions found in both. Additionally, 8% (119/1,495) of AD-associated DMRs coincided with ICRs, some previously implicated in AD.

[0097] Disclosed herein is a map of human ICRs that should accelerate the discovery of early acquired, disease-related differential methylation. The significant representation of candidate ICRs (8%) in AD-associated DMRs support the utility of these regions in early detection of a devastating disease for which pharmaceutical interventions may delay progression. Large-scale population-based studies are required to refine diagnostic targets.

### Materials and Methods for the Examples

[0098] Participants. Tissues from 12 conceptuses aged 65-95 days, with no apparent developmental abnormalities, of both sexes (confirmed by sex linked marker genotyping); both AAs and EAs were selected. These tissues were obtained from the National Institutes of Health funded Laboratory of Human Embryology at the University of Washington, Seattle, Wash., and snap frozen to preserve DNA/RNA integrity (NCSU Institutional Review Board #3565). Conceptus tissues are ideal for identifying ICRs because the gametic and somatic imprint marks are intact, and monoallelic gene expression of imprinted genes occurs primarily during embryonic development (Lambertini et al., 2012; Ishida & Moore, 2013; Green et al., 2015).

[0099] Whole genome bisulfite sequencing. Libraries for NextSeq sequencing were prepared from bisulfite converted DNA, with 27 of 36 samples passing quality control standards for sequencing by Illumina NextSeq with 12-15× sequencing coverage. Libraries were index-tagged for separating reads after multiplex sequencing, pooled into groups of nine, with each group split for sequencing on three separate lanes. Splitting samples across lanes ensured that no single sample is disproportionally affected by technical variability specific to an individual sequencing lane such as low read numbers or low read quality. For quality control, sample specific problems related to library quality were identified by consistent low quality of specific samples across lanes and affected samples were then re-run or removed from analysis if the problem persisted.

[0100] Bioinformatic approaches to identify ICRs. Samples were separated by index sequences, and aligned to a reference in silico bisulfite converted genome, eliminating reads without unique alignment to the reference sequence (due to either repetitive sequence or loss of specificity from bisulfite conversion of cytosines), and duplicate reads (indicative of clonal amplification of original random DNA fragments). From these reads, methylation fractions and read counts were calculated for all CpG sites in the genome.

[0101] We developed a puticr application using a Ruffus framework in Python. The workflow is detailed in FIG. 5. This application is designed to scan the genome and identify regions of allelic differential methylation based on some or all of the following four criteria: 1) ≥5 consecutive CpG sites, consistent with a cis-acting regulatory sequence, 2) methylation levels of ˜50%+/−15% at each site (i.e., 35%-65% methylation), consistent with monoallelic methylation (100% in one parental allele and 0% on the other), 3) similarity of methylation levels across the three germ layers, consistent with methylation being established before gastrulation, thus similar in all tissues, and 4) similarity of methylation across individuals, consistent with regulation of critical processes in early development, that do not vary by sex, ethnicity, developmental age, or person-to-person. In addition, fully methylated or unmethylated regions from oocyte and sperm sequences were also compared, as these are the original parent-of-origin specific regions.

[0102] Identification of aberrantly methylated ICRs in a complex human disease. To determine the role of ICR methylation in early detection of Alzheimer's disease differential methylation of ICRs, we obtained from the Duke University Bryan Brain Bank frontal cortex-derived DNA from 8 AAs and 8 EAs (4 in each ethnic group with Alzheimer's disease and 4 controls). We used whole genome bisulfite sequencing with 30× coverage, and bioinformatically identified regions of differential methylation between cases and controls overall and within each ethnic group.

### Example 1

### Characteristics of Human Imprint Control Regions (ICRs)

[0103] From the 36 libraries prepared from kidney, liver, and brain of 12 individuals (6 male, 6 female), 27 passed quality checks for Illumina NextSeq. The average number of reads for the 27 samples was 153 million (range 74-231 million), covering an average of 23.1 billion bases per sample (range 11.2-34.9 billion). Approximately 80% of reads had unique alignment to an in silico bisulfite converted human genome, and of 29.2 million CpG sites in the human genome, an average of 26.6 million (91%, range 86-94%) were covered by aligned reads for the set of 27 samples.

[0104] More than 75% of sequences obtained from the liver, brain and kidney DNA have sequence coverage >20× while the oocyte and sperm have a lower coverage as compared to those obtained for the three somatic tissues (FIG. 1A). Using methylation percentages calculated for CpG sites, candidate ICRs were defined based on the criteria of a 300 bp region with five or more consecutive CpG sites with individual methylation level of approximately 50% ±15% (35% to 65%) in somatic tissues; this is consistent with one parental allele being fully methylated while the other is unmethylated acting in cis for >80% of the sites. These regions of differential methylation also had to align in DNA derived from tissues representing the three germ layers, consistent with the establishment of these methylation marks before gastrulation, and the requirement that an ICR be in all cell types. Consistent with their function to control gene dosage in all individuals, these methylation marks also had to be similar across individuals. Using the most relaxed criteria 50%±20% (30% to 70%), we identified 7,559 putative ICRs, including most (88%) of known ICRs (FIG. 1B). FIGS. 1B and 1C also shows that tightening this methylation fraction window to 50% ±15% (35% to 65%) resulted in a decrease in the number of putative ICRs to 1,495 putative ICRs, including ˜80% of known ICRs. Further restricting the window to 50%±10% (40% to 60%) decreased the number of candidate ICRs to 127, including 63% of known ICRs.

[0105] Public databases for oocyte sequences (Accession No. JGAS00000000006, accessible through the website of the Japanese Genotype-phenotype Archive; see also Okae et al., 2014; incorporated herein by reference in its entirety) were used to identify regions of parent-of-origin reciprocal gametic methylation, e.g. 100% methylation in sperm, and 0% in ooctyes, or vice-versa, among those meeting the initial ICR criteria. This pattern is indicative of gametic differential methylation, which can persist through fertilization and development, and propagate into somatic differential methylation in the offspring. We superimposed DNA sequences for the 1,495 candidate ICRs on sequence data from oocytes and sperm that were either unmethylated, i.e., 0-10%, or fully methylated, i.e., 90-100%. The length of known ICRs are comparable to those of novel ICRs, ranging in size from 13-4,000 bp with a median of 375 bp for the known 24 ICRs (FIG. 1D), and median 248 bp for the 1,476 novel ICRs (FIG. 1E). Based on the methylation profiles of 27 individuals in the kidney, brain, liver and the gametes, FIGS. 2A-2D depict screenshots of the application (putICR) for the previously described MEG3, PEG10, and KCNQ1OT1 locus (Chr11:2,685,000-2,700,000) and previously unknown IGF2R. FIGS. 2A-2D also show DNA methylation levels in the three tissues around the expected ˜50% level, along with coinciding reciprocal gametic methylation, defining a region 10 times longer than is currently defined for this ICR. The 1,495 ICR sequences are found in the Sequence Listing.

### Example 2

### Similarity of Methylation of Marks Across Accessible Tissues

[0106] For epidemiologic inquiry, a critically important quality of DNA methylation marks is that they are replicable regardless of sequencing technologies, and are similar across tissues, such that accessible tissues in otherwise healthy humans, who often serve as controls, can serve as surrogates for inaccessible target tissues. Such cell types would be those found in peripheral blood or maternal or fetal tissues discarded at birth, such as decidua, the fetal side of the placenta, or human umbilical vein endothelial cells (HUVECS) present in the umbilical cord. To directly address this issue, we randomly selected a set of known and novel/putative ICRs to 1) replicate the findings that these methylation marks are ˜50% in the three germ layers, that 2) the 50% methylation was similar in DNA derived from multiple accessible tissues, and that 3) these methylation marks were similar in an independent sample of individuals.

[0107] For confirmation by a second sequencing method, pyrosequencing results from one of the novel ICRs, a sequence region in chromosome 2, comparing methylation measured by WGBS and pyrosequencing, which shows ˜50% methylation levels across multiple tissues. This and other regions were selected based on neighboring genes, correlated RNA expression, and/or somatic and gametic methylation that most closely fit the criteria. The similarity of methylation marks across tissues for the brains, kidneys, and livers of the nine individuals included in the WGBS data set, the data used to initially define the ICR, is shown in FIGS. 2A-2D.

[0108] To examine whether methylation marks at novel and known ICRs are similar across multiple tissues that are accessible in otherwise healthy humans, we used previously developed pyrosequencing assays (Murphy et al., 2012; which is incorporated herein by reference in its entirety) to measure methylation levels of the known ICRs regulating the imprinted expression of IGF2, PEG3 and PEG10 and juxtapose these with the novel ICRs proximal (and potentially regulatory) to GATA3 in Chr10, and RGPD1 in Chr 2. Methylation marks measured in adult mixed blood leukocytes, isolated CD14-monocytes from newborn cord blood, and HUVECs at the known ICRs regulating the imprinted expression of IGF2, PEG3 and PEG10. Methylation marks across the same tissues for the putative ICRs proximal to GATA3, and RGPD1 in Chr 2. For both the previously known and the putative ICRs, methylation is highly consistent across cell types and individuals, in the defining ˜50% range. Methylation marks in other tissues (including lung, gut, adrenal gland, spleen, thymus, and pancreas) and term placenta and fetal placenta also exhibit similar methylation marks.

### Example 3

### Functional Significance of ICR Methylation

[0109] To determine the extent to which putative ICRs are likely functional, we used a combination of public databases including the Analysis of Motif Enrichment (AME) application (accessible through the website of The MEME Suite) and the Comparative Toxicogenomics Database (CTD) to examine molecular functions and metabolic pathways associated with 1,495 putative ICRs. These analyses suggest that 914 genes are within 5,000 bp upstream and downstream of these putative ICRs, of which 17 were not recognizable by CTD. Of the remaining 897 genes, 374 genes were associated with “protein binding activity”, 70 genes were associated with “transcription regulator activity”, 52 genes were associated with “DNA-binding transcription factor activity,” 81 genes were associated with “DNA binding” and 29 genes were associated with “transcription co-regulator activity.” Approximately one third (n=253) of these 897 genes were related to “ion binding” including 185 genes “metal ion binding”, 186 genes “cation binding” and 59 genes “calcium ion binding.” The CTD enrichment pathway analysis also revealed nine pathways that were associated with these 897 genes close to 1,495 ICRs. These pathways were neuronal system and transmission across chemical synapses pathways, pathways in cancers, signal transduction, circadian entrainment, axon guidance, cholinergic synapse, glutamatergic synapse, and calcium signaling pathways. Remarkably, 17 genes were known to be associated with Alzheimer's disease.

### Example 4

### Association of ICRs with Major Human Diseases: Alzheimer's Disease as an Example

[0110] To determine whether there is a set of aberrantly methylated ICRs, likely established in development and stable throughout the life course, that are associated with AD risk, we used whole genome bisulfite sequencing to sequence DNA derived from the frontal cortex of eight AD males and females (four AAs and four EAs) and age, sex and ethnicity-matched control brains. FIG. 3A shows that using criteria that define differentially methylated regions (DMRs) as regions with at least four CpG sites within 300 bp, with absolute methylation changes of at least 10% and covered with at least seven sequence reads (Sun et al., 2014), in the same direction (all increased or all decreased). In all cases, the bisulfite conversion was greater than 97% (FIG. 3A), and the sequence coverage ranges between 15×-36× (FIGS. 3B and 3C) with no sequence duplication bias (FIG. 3D). We identified ˜31,600 DMRs in AA AD samples, 731 were identified in EAs, and 11,252 were found in AD samples when samples were combined regardless of ethnicity (FIG. 3E). Of these, 89 were common between AAs and EAs. The overall overlap between AAs, EAs and combined races DMRs, and ICRs are shown in FIG. 4A. Of these, 89 were found in both AAs and EAs. Interestingly, when we compared the AD-related DMRs to the set of candidate ICRs, 84 DMRs among AAs overlap 81 ICRs, while 27 DMRs from EAs overlap 27 ICRs. For DMRs identified in combined ethnicities, 52 overlap 40 DMRs. In total, 120 of the 1,495 candidate ICRs overlap DMRs defined in AD frontal cortex tissue.

[0111] FIG. 3B shows examples of the sequence regions near AKAP2, which are AD-related loci that also overlap with novel putative ICRs. Furthermore, consistent with APOE genetic or epigenetic variation associated with Alzheimer's disease being only sporadically found in AA individuals (19), the 31,600 DMRs associated in AAs do not include the APOE locus. Intriguingly, the ICR that overlaps with APOE is one of 89 DMRs that are AD-related in the 120 ICRs we found in AAs and in EAs.

[0112] Among EA donors for whom blood DNA was also available, and therefore sequenced, over 66,000 DMRs were identified between cases and controls. Of these 210 were in common with DMRs from the brain tissue of EAs, 168 overlapped with putative ICRs, and five DMRs are found in both blood and tissue, and overlapped an ICR. Of these 5 DMRs, one of these genes mapped to known ICRs, two mapped close to piRNA reported as a signature for AD (e.g., AKAP2 in FIG. 4) (20), and two proximal to known genes, one of them implicated to AD. The two in proximity to zinc-finger transcription factors, ZNF429 and ZNF597, are imprinted (maternally expressed) with deletion resulting in defects in neural development.

[0113] We performed CTD Batch Analysis of 82 genes within 5,000 bp upstream and downstream of 119 putative ICRs which are found differentially methylated in Alzheimer's Disease patients. From these 82 genes, five genes were associated with transcription co-activator activity (MAML2), DNA-binding transcription activator activity (NFATC1, NFIC), DNA-binding transcription factor activity (NFATC1, NFIC, PEG3), DNA-binding transcription repressor activity (NFATC1, ZNF536), RNA polymerase II transcription coactivator binding (NFATC1), RNA polymerase II transcription factor binding (NFATC1), and transcription factor binding (NFATC1). Furthermore, the Reactome software (accessible through the website of Reactome) for pathway analyses revealed that 31 out of 82 identifiers in the sample were found in Reactome, where 219 pathways were activated by at least one of them. The top five pathways determined were prostacyclin signaling through prostacyclin receptor (GNAS), PKA activation in glucagon signaling (GNAS), Glutamate Neurotransmitter Release Cycle (NFATC1, PPFIA4), ADORA2B mediated anti-inflammatory cytokines production (ADM2, GNAS, GPR45), and glucagon-type ligand receptors (GNAS). These in silico observations support that the majority of the 1,495 putative ICRs identified here are functional, and a number are involved in neurodevelopment and function.

### Example 5

### Identification of Differentially Methylated Regions (DMRs) Related to Alzheimer's Disease

[0114] To identify AD-related genomic locations including ICRs that are relevant for at least two racial/ethnic groups, DMRs were identified from brain tissue of Alzheimer's patients as compared to age matched controls, as consecutive CpG sites with altered methylation associated with the disease state. DMRs that showed highest changes in methylation level, and strongest consistency across individuals were selected. We performed differentially methylated region (DMR) analysis of temporal lobe derived brain genomic DNA from African Americans (5 AD cases, 4 Controls), and Whites (4 AD cases, 4 Controls). African Americans with AD had four times as many DMRs (˜31.6K) compared to Whites with AD (731); the significantly higher number of DMRs in Blacks with AD may well reflect the disproportionately higher accumulations of ‘insults’ throughout the life course, effects of social and health disparities.

[0115] Comparing cases and controls with ethnicities merged resulted in 11,252 DMRs associated with AD.

[0116] To identify DMRs likely acquired before gastrulation that are likely stable when occurring on ICRs and can be detected in peripheral tissues such as blood, we examined the overlap between AD temporal lobe derived brain DMRs and the ICRs 1-1495, observing a total of 120 ICRs overlapping with AD DMRs, 81 of which were found in Black AD cases compared to 27 in White AD cases (with only 2 in common), and 14 DMRs that were only significant in the merged datasets (FIG. 6).

[0117] When taken together, these data were consistent with stable epigenetic dysregulation acquired before gastrulation, and therefore detectable in all tissues/cell types, contributing to Alzheimer's Disease in African Americans and Whites, and therefore hold enormous prospects for early detection using accessible cell types.

### Discussion of the Examples

[0118] Thus far, investigations into the developmental origins of disease susceptibility have been stymied by our limited knowledge of where recognizable patterns of these effects can be detected and quantified in the epigenome, particularly when using DNA from sample types accessible in otherwise healthy human populations. While sequence regions controlling the monoallelic expression of imprinted genes have been previously proposed as targets for such studies (Hoyo et al., 2009), only 24 of these regions had been described (Skaar et al., 2012), with potentially hundreds more unknown.

[0119] A significant contribution with respect to the presently disclosed subject matter is the characterization of 1,611 putative human ICRs and validation using genomic DNA obtained from multiple ethnic groups and tissues and cell types. These novel ICRs have an average CpG dinucleotide content of 23, and size range 13 to ˜4,000 bp. They also have characteristics very similar to the 24 previously characterized ICRs, while in many cases, expanding the regions for the 24. Ninety percent of these putative ICRs are in genomic regions of functional importance to gene regulation, including 30% (n=453) in regions of DNASE1 hypersensitivity and 22% (n=328) overlapping transcription factor binding sites. Refining the boundaries of these ICRs will be iterative, nonetheless, given the broad interest and the known importance of ICRs in early development, WGBS data for tissue derivatives of the three germ layers and sperm demonstrating the sequence regions identified and the striking similarities of these regions across chromosomal locations is available. A custom microarray chip for these ICRs is also under development, to enable largescale screening, for example, to estimate the proportion of diseases with early origins or determine in adults whether stable marks can be used to augment screening algorithms. Such a custom chip can also be used to identify patterns associated with epigenetic response to early exposures. While such exposures are often transient, they nonetheless leave a ‘record’ of responses. Depending on the accumulation of these changes, they, in combination with underlying genetic factors and other exposures, could contribute to disease. The abilities to screen for past exposure marks, and also predict future risk of complex diseases, based on specific ‘molecular patterns’ detectable in accessible tissues, should accelerate the discovery of genomic regions of importance to disease and exposure, for closer interrogation in human disease studies.

[0120] We have established the contours of a screening tool that could be developed to detect a propensity for AD early, which will be especially useful when pharmaceutical or other interventions becomes available for significantly decelerating progression, improving quality of life and reducing costs of care. Our finding that 8% of AD-related DMRs and 5% of these are also similar in peripheral blood-derived DNA, implies that these ICRs can be found in DNA derived from peripheral tissues. Since these methylation marks are acquired before gastrulation and, despite drift with age, are stable over the life course, this implies that the custom methylation assay chip under development could be evaluated as a screening tool for AD, for triaging individuals for existing early pharmaceuticals that can stem progression. Although the number of differentially methylated regions associated with AD in AAs was ˜40 times higher than those found in EAs, and peripheral blood samples were not available from AA donors, the prospect of determining the feasibility of these marks for screening is being evaluated in an ongoing case-control study of AA and EA cases and controls.

[0121] These findings, however, should be interpreted in the context of their limitations. One limitation is that, in developing the algorithm putICR, used to identify methylation marks genome-wide, we used methylation fractions ranging from a liberal 30-70% (50±20%), to a more conservative 45%-55%, (50±5%). This approach precludes evaluation of a continuous pattern of methylation changes to define ICR boundaries. Since DNA methylation sequence data are available online, strategies such as change-point modeling have been used in copy number variant analyses and could be deployed, should a need for improved precision in ICR region boundaries arise. Another limitation is that cloned allele analysis, which would definitively define bona fide ICRs would need to be performed on all novel putative ICRs. While high throughput methods for cloned-allele analysis exist, a higher priority is to screen for ICRs of importance to disease or exposure, before cloned allele analyses are conducted. Consequently, we expect that not all 1,495 putative ICRs are bona fide ICRs; however, based on the characteristics of known ICRs, we are confident that >90% of human ICRs are captured in our sequence data. Finally, the lack of peripheral blood for AA AD donors presents a limitation, and provides a poignant example of why ethnic minorities should participate in biomedical research studies, despite the documented difficulties.

[0122] Despite these limitations, we provide the first draft of the human ICRs—the human imprintome—and have empirically demonstrated that ˜8% of Alzheimer's disease associated DMRs in the frontal cortex are within ICRs. This implies that these sequence regions are also present in accessible peripheral blood DNA, paving the way for a novel early-screening tool for AD.

[0123] Summarily, we generated a comprehensive compendium of all human Imprint Control Regions using whole genome bisulfite sequencing (WGBS) analysis of brain (ectoderm), kidney (mesoderm) and liver (endoderm) from banked embryonic tissue from nine conceptuses (27 libraries total), and analyzed the data to identify novel ICRs. These ICRs were identified based on the widely accepted assumptions that ICR methylation patterns are consistent across different tissues because they are established pre-gastrulation, ICR methylation patterns, once established, are stable over the life course. We also sequenced bisulfite-converted human sperm DNA, and downloaded WGBS data for human eggs from the Japanese Genotype-phenotype Archive (accession number JGAS00000000006). Data were analyzed in-house using a custom bioinformatic pipeline, putICR, to assess methylation and identify regions of the genome with approximately 50% (±15%) methylation, which would indicate parent of origin methylation. Using these criteria, we identified 1611 candidate ICRs, including 20 of the 24 previously characterized ICRs.

### REFERENCES

[0124] All references cited in the instant disclosure, including but not limited to all patents, patent applications and publications thereof, scientific journal articles, and database entries, are incorporated herein by reference in their entireties to the extent that they supplement, explain, provide a background for, or teach methodology, techniques, and/or compositions employed herein.
[0125] Altschul et al. (1990) Basic local alignment search tool. J Mol Biol 215: 403-410.
[0126] Ausubel et al. (2002) Short Protocols in Molecular Biology, Fifth ed. Wiley, New York, N.Y., United States of America.
[0127] Ausubel et al. (2003) Current Protocols in Molecular Biology, John Wylie & Sons, Inc., New York, N.Y., United States of America.
[0128] Batzer et al. (1991) Enhanced evolutionary PCR using oligonucleotides with inosine at the 3′-terminus. Nuc Acids Res 19:5081.
[0129] Bernal et al. (2013) Adaptive radiation-induced epigenetic alterations mitigated by antioxidants. FASEB J 27(2):665-71.
[0130] Cassidy & Charalambous (2018) Genomic imprinting, growth and maternal-fetal interactions. The Journal of Experimental Biology. 2018;221(Pt Suppl 1):jeb164517.

[0131] Crespi (2008) Genomic Imprinting in the Development and Evolution of Psychotic Spectrum Conditions. Biol Rev Camb Philos Soc 83(4):441-493.
[0132] Franks & McCarthy (2016) Exposing the exposures responsible for type 2 diabetes and obesity. Science. 354(6308):69-73.
[0133] Green et al. (2015) Expression of imprinted genes in placenta is associated with infant neurobehavioral development. Epigenetics 10(9):834-41.
[0134] Henikoff & Henikoff (1992) Amino Acid Substitution Matrices from Protein Blocks. Proc Natl Acad Sci U S A 89:10915-10919.
[0135] Hoyo et al. (2009) Imprint regulatory elements as epigenetic biosensors of exposure in epidemiological studies. J Epidemiol Community Health 63(9):683-684.
[0136] Ishida & Moore (2013) The role of imprinted genes in humans. Mol Aspects Med 34(4):826-840.
[0137] Jain et al. (2019) A combined miRNA-piRNA signature to detect Alzheimer's disease. Translational Psychiatry 9(1):250.
[0138] Jirtle & Skinner (2007) Environmental epigenomics and disease susceptibility. Nature Reviews 8(4):253-262.
[0139] Jirtle (1999) Genomic imprinting and cancer. Exp Cell Res 248(1):18-24.
[0140] Jirtle (2004) IGF2 loss of imprinting: a potential heritable risk factor for colorectal cancer. Gastroenterology 126(4):1190-1193.
[0141] Karlin & Altschul (1993) Applications and statistics for multiple high-scoring segments in molecular sequences. Proc Natl Acad Sci U S A 90(12):5873-5877.
[0142] Kitsiou-Tzeli & Tzetis (2017) Maternal epigenetics and fetal and neonatal growth. Curr Opin Endocrinol Diabetes Obes 24(1):43-46.
[0143] Krämer et al. (2019) How to copy and paste DNA microarrays. Sci Rep 9(1):13940.
[0144] Lambertini et al. (2012) Imprinted gene expression in fetal growth and development. Placenta 33(6):480-486.
[0145] Li et al. (2020) Potential role of genomic imprinted genes and brain developmental related genes in autism. BMC Medical Genomics 13:54.
[0146] Lorgen-Ritchie et al. (2019) Imprinting methylation in SNRPN and MEST1 in adult blood predicts cognitive ability. PLoS One 14(2):e0211799.
[0147] Luedi et al. (2007) Computational and experimental identification of novel human imprinted genes. Genome Res. 17(12):1723-1730.
[0148] Moran et al. (2016) Validation of a DNA methylation microarray for 850,000 CpG sites of the human genome enriched in enhancer sequences. Epigenomics 8(3):389-399.
[0149] Murphy et al. (2012) Differentially methylated regions of imprinted genes in prenatal, perinatal, and postnatal human tissues. PLoS One 7(7):e40924.
[0150] Murphy (2012) Targeting the epigenome in ovarian cancer. Future Oncol. 8(2):151-164.
[0151] Murrell et al. (2006) Association of apolipoprotein E genotype and Alzheimer disease in African Americans. Archives of Neurology 63(3):431-434.
[0152] Needleman & Wunsch (1970) A general method applicable to the search for similarities in the amino acid sequence of two proteins. J Mol Biol 48:443-453.
[0153] Ohtsuka et al. (1985) An alternative approach to deoxyoligonucleotides as hybridization probes by insertion of deoxyinosine at ambiguous codon positions. J Biol Chem 260:2605-2608.
[0154] Okae et al. (2014) Genome-Wide Analysis of DNA Methylation Dynamics during Early Human Development. PLoS genetics 10:e1004868.
[0155] Pearson & Lipman (1988) Improved tools for biological sequence comparison. Proc Natl Acad Sci USA 85:2444-2448.
[0156] Pigeyre et al. (2016) How obesity relates to socio-economic status: identification of eating behavior mediators. International Journal of Obesity 40(11):1794-1801.
[0157] Pirrung (2002) How to make a DNA chip. Angew Chem Int Ed Eng! 41(8):1276-1289.
[0158] Poelmans et al. (2013) AKAPs integrate genetic findings for autism spectrum disorders. Translational Psychiatry 3:e270.
[0159] Rossolini et al. (1994) Use of deoxyinosine-containing primers vs degenerate primers for polymerase chain reaction based on ambiguous sequence information. Mol Cell Probes 8:91-98.
[0160] Sandoval et al. (2011) Validation of a DNA methylation microarray for 450,000 CpG sites in the human genome. Epigenetics 6(6):692-702.
[0161] Seifan et al. (2015) Early Life Epidemiology of Alzheimer's Disease—A Critical Review. Neuroepidemiology 45:237-254.
[0162] Skaar et al. (2012) The human imprintome: regulatory mechanisms, methods of ascertainment, and roles in disease susceptibility. ILAR J 53(3-4):341-358.
[0163] Smith & Waterman (1981) Identification of common molecular subsequences. Adv Appl Math 2:482.
[0164] Snowdon et al. (1996) Linguistic Ability in Early Life and Cognitive Function and Alzheimer's Disease in Late Life. Findings From the Nun Study. JAMA 274:528-532.
[0165] Sun et al. (2014) MOABS: model based analysis of bisulfite sequencing data. Genome Biology 15(2):R38.
[0166] U.S. Patent Application Publication Nos. 2010/0056397, 2010/0304997, 2011/0105357, 2015/0232921.
[0167] U.S. Pat. Nos. 6,355,431; 6,429,027; 6,936,461; 7,824,917; 8,697,359 9,395,360; 9,688,971; 9,828,640.
[0168] Waterland (2003) Do maternal methyl supplements in mice affect DNA methylation of offspring? J Nutr. 133(1):238.

[0169] It will be understood that various details of the presently disclosed subject matter can be changed without departing from the scope of the presently disclosed subject matter. Furthermore, the foregoing description is for the purpose of illustration only, and not for the purpose of limitation.

1-6. (canceled)

7. A method for detecting a presence of and/or a susceptibility to a medical condition associated with monoallelic gene expression in a subject, the method comprising:
(a) obtaining a biological sample from the subject, wherein the biological sample comprises one or more nucleic acid molecules that correspond to an Imprint Control Region (ICR) selected from the group consisting of ICRs 1-1611, the genomic regions associated with SEQ ID NOs: 1612-1816, or a subset thereof;
(b) analyzing the one or more nucleic acid molecules to determine the DNA methylation status of one or both alleles of at least one imprinted gene associated with at least one of ICRs 1-1611 and/or the genomic regions associated with SEQ ID NOs: 1612-1816; and
(c) comparing the DNA methylation status of the one or both alleles of the at least one imprinted gene associated with the at least one of ICRs 1-1611 and/or the genomic regions associated with SEQ ID NOs: 1612-1816 to a control DNA methylation status,
wherein the comparing detects a presence of and/or a susceptibility to a medical condition associated with monoallelic gene expression in a subject.

8. The method of claim 7, wherein the DNA methylation status comprises one or more epigenomic features of at least one imprinted gene.

9. The method of claim 8, wherein the one or more epigenomic features comprises a methylation profile of the subject with respect to at least one imprinted gene.

10. The method of claim 9, wherein the one or more epigenomic features are selected from the group consisting of a DNA sequence methylation state, a nucleosome positioning feature, and a histone modification.

11. The method of claim 8, wherein the one or more epigenomic features relates to a gene for which expression or lack of expression is associated with the medical condition.

12. The method of claim 11, wherein the medical condition is Alzheimer's disease.

13. The method of claim 12, wherein at least one imprinted gene is selected from the set of genes associated with Alzheimer's disease, based on proximity to epigenomic features, correlated expression in association to epigenomic features, or reported association to Alzheimer disease in combination with either of the first two criteria.

14. The method of claim 7, wherein the biological sample comprises genomic DNA isolated from a cell, tissue, or organ of the subject, optionally a cell, tissue, or organ that is not affected by the medical condition.

15. A method for predicting a susceptibility to future development of a medical condition associated with monoallelic expression in a subject prior to the onset of any symptoms of the medical condition in the subject, the method comprising:
(a) obtaining a biological sample from the subject, wherein the biological sample comprises one or more nucleic acid molecules that correspond to an Imprint Control Region (ICR) selected from the group consisting of ICRs 1-1611 and/or the genomic regions associated with SEQ ID NOs: 1612-1816, or an informative subset thereof;
(b) analyzing the one or more nucleic acid molecules to determine the DNA methylation status of one or both alleles of at least one imprinted gene associated with at least one of ICRs 1-1611 and/or the genomic regions associated with SEQ ID NOs: 1612-1816; and
(c) determining whether the DNA methylation status determined correlates with future development of the medical condition,
whereby a susceptibility to future development of the medical condition is predicted.

16. The method of claim 15, wherein the DNA methylation status comprises one or more epigenomic features of at least one imprinted gene.

17. The method of claim 16, wherein one or more epigenomic features comprises a methylation profile of the subject with respect to at least one imprinted gene.

18. The method of claim 17, wherein one or more epigenomic features are selected from the group consisting of a DNA sequence methylation state, a nucleosome positioning feature, and a histone modification.

19. The method of claim 16, wherein the one or more epigenomic features relates to a gene for which expression or lack of expression is associated with the medical condition.

20. The method of claim 19, wherein the medical condition is Alzheimer's disease, autism, schizophrenia, or a tumor or cancer, optionally hepatocellular carcinoma.

21. The method of claim 18, wherein the at least one imprinted gene is selected from those listed in Tables 2 and 3.

22. The method of claim 15, wherein the biological sample comprises genomic DNA isolated from any cell, tissue, or organ of the subject, including a cell, tissue, or organ that is generally unaffected in subjects who have the medical condition, and not necessarily usable for diagnosis of conditions affecting target tissues by means specific to those affected tissues, including, but not limited to, physical morphology, immunological assays, protein expression, or RNA expression.

23. A nucleic acid array comprising one or more interrogatable nucleotide molecules, wherein the interrogatable nucleotide molecules are designed to allow identification of the DNA methylation status of ICRs that regulate one or more genes subject to monoalleleic expression in a biological sample isolated from a subject.

24. The nucleic acid array of claim 23, wherein nucleic acid array comprises, consists essentially of, or consists of a plurality of interrogatable nucleotide molecules that correspond to one or more of ICRs 1-1611 and/or the genomic regions associated with SEQ ID NOs: 1612-1816, optionally wherein the interrogatable nucleotide molecules comprise, consist essentially of, or consist of:
(a) target probes that comprise, consist essentially of, or consist of nucleotide sequences that are complementary to the nucleic acid sequences of ICRs 1-1611 and/or the genomic regions associated with SEQ ID NOs: 1612-1816 and/or an informative subset thereof; and
(b) target probes that comprise, consist essentially of, or consist of nucleotide sequences that are complementary to the nucleic acid sequences of ICRs 1-1611 and/or the genomic regions associated with SEQ ID NOs: 1612-1816 and/or the informative subset thereof subsequent to exposing the nucleic acid sequences of ICRs 1-1611 and/or the genomic regions associated with SEQ ID NOs: 1612-1816 and/or the informative subset thereof to a bisulfite converting treatment.

25. The nucleic acid array of claim 23, wherein the interrogatable nucleotide molecules can be interrogated with human genomic DNA.

26. The nucleic acid array of claim 23, wherein the plurality of interrogatable nucleotide molecules correspond to at least 100, 250, 500, 1000, or all of ICRs 1-1611 and/or the genomic regions associated with SEQ ID NOs: 1612-1816.

The application's sequence listing, which the Patent Office published only in electronic form, follows.

SEQUENCE LISTING (1816 sequences)

SEQ ID NO: 1 - DNA, 251 bp, Homo sapiens
ggaaccccacgcggcgctcagcacggacgaggagggagccgcgcacgcgcggtcggctcggcgaggagccggtctccaagtgccgccagctgcgggatttcctctgcaaaagacaaaccacagggagagctgccggggctgggtgggggagcgtgactgtgaacggagttctgggggtgatgtaactgttctgtatccacagtgttgctacatgaatctataaatgtgttaaactcatagaactgtacacc

SEQ ID NO: 2 - DNA, 1833 bp, Homo sapiens
gtttgaaatggtcatccatcctttggccccaatacctaaactaaggtctatgaacaataagatgattttcttcagtgggacttttttgtttaatatattagatttgaccttcagcaaggtcaaagggagtccgaactagtctcaggcttcaacatcgaatacgccgcaggccccttcgccctattcttcatagccgaatacacaaacattattataataaacaccctcaccactacaatcttcctaggaacaacatataacgcactctcccctgaactctacacaacatattttgtcaccaagaccctacttctgacctccctgttcttatgaattcgaacagcatacccccgattccgctacgaccaactcatacacctcctatgaaaaaacttcctaccactcaccctagcattacttatatgatatgtctccatacccattacaatctccagcattccccctcaaacctaagaaatatgtctgataaaagagttactttgatagagtaaataataggagtttaaatccccttatttctaggactatgagaatcgaacccatccctgagaatccaaaattctccgtgccacctatcacaccccatcctaaagtaaggtcagctaaataagctatcgggcccataccccgaaaatgttggttatatccttcccgtactaattaatcccctggcccaacccgtcatctactctaccatctttgcaggcacactcatcacagcgctaagctcgcactgattttttacctgagtaggcctagaaataaacatgctagcttttattccagttctaaccaaaaaaataaaccctcgttccacagaagctgccatcaagtatttcctcacgcaagcaaccgcatccataatccttctaatagctatcctcttcaacaatatactctccggacaatgaaccataaccaataccaccaatcaatactcatcattaataatcataatggctatagcaataaaactaggaatagccccctttcacttctgagtcccagaggttacccaaggcacccctctgacatccggcctgctccttctcacatgacaaaaactagcccccatctcaatcatataccaaatttctccctcattaaacgtaagccttctcctcactctttcaatcttatccatcatggcaggcagttgaggtggattaaaccaaacccaactacgcaaaatcttagcatactcctcaattacccacataggatgaataacagcagttctaccgtacaaccctaacataaccattcttaatttaactatttatattatcctaactactaccgcattcctactactcaacttaaactccagcaccacaaccctactactatctcgcacctgaaacaagctaacatgactaacacccttaattccatccaccctcctctccctaggaggcctgcccccgctaaccggctttttgcccaaatgggccattatcgaagaattcacaaaaaacaatagcctcatcatccccaccatcatagccatcatcaccctccttaacctctacttctacctgcgcctaatctactccacctcaatcacactactccctatatctaacaacgtaaaaataaaatgacagtttgaacacacaaaacccaccccattcctccccacactcatcgcccttaccacactgctcctacctatctccccttttatgctaataatcttatagaaatttaggttaaatacagaccaagagccttcaaagccctcagtaagttgcaatacttaatttctgcaacagctaaggactgcaaaaccccactctgcatcaactgaac

SEQ ID NO: 3 - DNA, 651 bp, Homo sapiens
gtactacgttgtagcccacttccactatgtcctatcaataggagctgtatttgccatcataggaggcttcattcactgatttcccctattctcaggctacaccctagaccaaacctacgccaaaatccatttcgctatcatattcatcggcgtaaatctaactttcttcccacaacactttctcggcctatccggaatgccccgacgttactcggactatcccgatgcatacaccacatgaaatatcctatcatctgtaggctcattcatttctctaacagcagtaatattaataattttcataatttgagaagccttcgcttcgaagcgaaaagtcctaatagtagaagaaccctccataaacctggagtgactatatggatgccccccaccctaccacacattcgaagaacccgtatacataaaatctagacaaaaaaggaaggaatcgaaccccccaaagctggtttcaagccaaccccatggcctccatgactttttcaaaaagatattagaaaaaccatttcataactttgtcaaagttaaattataggctaaatcctatatatcttaatggcacatgcagcgcaagtaggtctacaagacgctacttcccctatcatagaagagcttatcatctttcatgatcac

SEQ ID NO: 4 - DNA, 1540 bp, Homo sapiens
gtcctagaattaattcccctaaaaatctttgaaatagggcccgtatttaccctatagcaccccctctaccccctctagagcccactgtaaagctaacttagcattaaccttttaagttaaagattaagagaaccaacacctctttacagtgaaatgccccaactaaatactaccgtatgacccaccataattacccccatactccttacactattcctcatcacccaactaaaaatattaaatacaaattaccacctacctccctcaccaaagcccataaaaataaaaaactataacaaaccctgagaaccaaaatgaacgaaaatctgttcacttcattcattgcccccacaatcctaggcctacccgccgcagtactgatcattctatttccccctctattgatccccacctccaaatatctcatcaacaaccgactaattaccacccaacaatgactaatccaactaacctcaaaacaaatgatagccatacacaacactaagggacgaacctgatctcttatactagtatccttaatcatttttattgccacaactaacctcctcggactcctgcctcactcatttacaccaaccacccaactatctataaacctagccatggccatccccttatgagcgggcgcagtgattataggctttcgctctaagattaaaaatgccctagcccacttcttaccacaaggcacacctacaccccttatccctatactagttattatcgaaaccatcagcctactcattcaaccaatagccctggccgtacgcctaaccgctaacattactgcaggccacctactcatgcacctaattggaagcgccacactagcaatatcaactattaaccttccctctacacttatcatcttcacaattctaattctactgactatcctagaaatcgctgtcgccttaatccaagcctacgtttttacacttctagtaagcctctacctgcacgacaacacataatgacccaccaatcacatgcctatcatatagtaaaacccagcccatggcccctaacaggggccctctcagccctcctaatgacctccggcctagccatgtgatttcacttccactccacaaccctcctcatactaggcctactaaccaacacactaaccatataccaatgatggcgcgatgtaacacgagaaagcacataccaaggccaccacacaccacctgtccagaaaggccttcgatacgggataatcctatttattacctcagaagtttttttcttcgcaggatttttctgagccttttaccactccagcctagctcccaccccccaactagggggacactggcccccaacaggcatcaccccgctaaatcccctagaagtcccactcctaaacacatccgtattactcgcatcaggggtatcaatcacctgagctcaccatagtctaatagaaaacaaccgaaaccaaataattcaagcactgcttattacaattttactgggtctctattttaccctcctacaagcctcagagtacttc

SEQ ID NO: 5 - DNA, 35 bp, Homo sapiens
gccgccgccccccccccccgccccgccgcggagcc

SEQ ID NO: 6 - DNA, 43 bp, Homo sapiens
gtgtccccaccgaggggcgtcacaaccgtcctccacaccgggc

SEQ ID NO: 7 - DNA, 48 bp, Homo sapiens
gactactacctgccctacgcgctgggcggcggctacgtgctctcggcc

SEQ ID NO: 8 - DNA, 206 bp, Homo sapiens
ggccgggcgcggtggctcacgcctgtaatcccagcactttgggaggccgaggcgggcggatcacgaggtcgggagatccagaccgtcctgcctaacccggtgaaaccccgtctctactaaaaatacaaaaaattagccgggcgtggtggcgggcgcctgtagtcccagctactcgggaggctgaggcaggagaatggcgtgaaccc

SEQ ID NO: 9 - DNA, 548 bp, Homo sapiens
ggctaatttttatattattagtagagacagggtttcacaatgttggccaggctggtctcgaattcctgacctcaagtgatccacccgcctgagcctccgaaagtgctgggcttacaggcgtgagccaccacgccccgacggggattagttttcaaatggctaccctaacttcctaggacataaatagttaaactgtttagatggaaagattcaacaaagggctgggcgtggtggctcatgtgagcctgtaatcccagcactttgagagcagcctgggcaacagagggagatcctgtctcttcaaacaaacaaaaaaattcaataaagggaatgtgaactatgtatcgtggcctaaaggcatttggagacataaaggtgccatgaatctgccctcagggatgagacgccaacggagactgattggcaggagtgggggaggaaagaaaatgtaaagaaagggggagcagggtaaactaaaggagagaaaaggggagaggaaggagaagtggggtgggggagaggggtgggaaagaagagggaggcaggcc

SEQ ID NO: 10 - DNA, 338 bp, Homo sapiens
gcagcccccatcccagggctctcctgggcacgttgtccctggttcctgcctgtctggcctgcagagagctccctggagtcactgccctgtgctggccactgggctcaggatgcctgcctgctgtggacaggggctggctgctgccgggtggccccaaagccccaggttccaggagacccagcacacttggggtctgcagctggccagggaagggcctagtcttaggagggggcagtggtgggagtggctctgagcccaccctccgtgcctgcgtcctctgggcagagggaggggagccagcagaacagtccttacagactccacgtgccgccgaggac

SEQ ID NO: 11 - DNA, 227 bp, Homo sapiens
gacagcctggagcagcacccacacccccagttgagcatctgatggtctggagcagcacccacaaccacaggtgaacatcagagagtctggagcagcgcccacaaccccaggcgagcatctgacagcctggagccgtgcccaaacacccaggtgagcatctgacagcatggagcagcacccatagcccaaggtgagcatctgacaacttggagcagcacccacacccc

SEQ ID NO: 12 - DNA, 78 bp, Homo sapiens
gcacgtgacagcctggaagagcacccacaccccaaggcgagcatctgacggcctggaacggcacccacacccccaggc

SEQ ID NO: 13 - DNA, 346 bp, Homo sapiens
ggccggcctgccccttaccagccgcaggaccagccgggagaaggctggaggcgggtcccactgcctgagggcctgggtgcagcctcactgccccacaagcagaaccaacgcctgcgagctccttaacaatgcgcggtgtgggccacctgcgagctccttaacaatgcgcggccccatgccggacctactgtgttccgacagaatccgcggcatagaatcagccctgcgcctccagagcccaatcctaatgcccccacctggaaggggcttctgttgtcctgggaccagcttcagaatggcaggtgatgaagccaagatccgcggatccaccgagggtcaggggccc

SEQ ID NO: 14 - DNA, 396 bp, Homo sapiens
ggatgttggtgtttcaatcctattctctgctttgtgtttacataagaccatattatgtagaactgcattttcaagaacgggtagggagcaaacaagtccagctcattcacatacatacacacacacacacacacacacacacaacttgctaacttcatagactactaggatgagcacctgaatcattcattctcacaactaaatagtacagccctcctatgtgccaaacaccgttcatgcacatcacgtgtcattgtaaacaaaacaaagtccctgtcctggtgacactcaccacaggagaccgacaataacagataagaaggccagctgctcccaggaagggctgagcacccgggaggaacgcggggtgacagctggagacacggtggcaagggc

SEQ ID NO: 15 - DNA, 100 bp, Homo sapiens
gaactccttccagcgccgcgctgggaccgcgtccatcacgtcgtagagctgcgggcccggctgcagcatcatggctggcgagccggctggggactctggc

SEQ ID NO: 16 - DNA, 401 bp, Homo sapiens
gctcagcggggcatcagttccaagcggagggtaaaagggagccaggcagagaccacttcttttgttactcagtccatgcgaggtggtggcgtcagccctgcttcagggaggacgcctgctgctcagcgtcccttctgcaaggagctgtggggaccccattctctttcccagacacgggcacccgaccctagggctgggaagtcatctgcccccatgtcctgtgcctggtgcacaacccccttcccctgtccttctccgaagcaccagccgccgcctggaagaattcttccctcccacccaaggcagcggtgggcacgcccagcccttggtcctgttctccagggaacccagccgtgtgcgcagggagagtttctcagtgtggctgaaatgtatccaaggac

SEQ ID NO: 17 - DNA, 316 bp, Homo sapiens
gggttagctgcttccttcccggcatggccctgcctctttaaactcattcccgggggggacgagactgttgcctgatgcagcaggggcagccagcagaagcactcctggctgctggatgaagaaacctttacatcccaggatccccctctgagatcaatgaacagatgggttttcacaacaagctctgtctcaaggcaagccttatgtacgttaccgaccgtggccgtgatgtccagcctgcagcatcttttttttttttttttttttttttctgagacggagtcttgctctgtcacccaggctggagtgcagtggc

SEQ ID NO: 18 - DNA, 557 bp, Homo sapiens
ggatgtcagctctggtcctgcagcttccccagcctggctccacctgtctgacctgttgggctcgctgccgcctctgggcctggcacagccgcagggagcggggctcgctgccagcacccaggcccctccataggtgtgcattcacctgccaagaggtgcaggcgcacaagtgccctcccctctctgctcccaccatgtgacctgccccccagccggacaggcactggagcatctccctcggtgtcactggaatttcaaacctgaagctggcagagagaaagaagaaagggaagaagaagaggggagggggacagaggaaaaatcctggcccccacaactaaccaacagtccttccgtgatgtcgtggaggtcaggccaggtggggccagcagccccgtcacggtgatcgtcagggtcaaattccagggctgctctttccccctgggtggctattttgggaaagcagcttttctccagcagtggacagactagctactatggacgctggaatccagaagactcagagctctgccagggcccagcacaggtaaaggcac

SEQ ID NO: 19 - DNA, 36 bp, Homo sapiens
gcccccgcccccgccgcgcgcgcccccgccgcgcgc

SEQ ID NO: 20 - DNA, 511 bp, Homo sapiens
ggggcctgtcatccccctgcttcttgtgcctggctctccaggcctgcctgtccattctagctattccactcggtcctctaactctgcgggtacgcaaagataaataaaggagagcccgctctgatctctgcagtctggaagtcaccaatctgtctgcttaaacagcaacggtcacataacatctaacaaccaaagccaccatccttccagttacaatcggatcacaccatctggggttctggcttggctctctgagcgtgctttcctgggttgtttaggctaggaattctcagccctactgccccacgttccttcctctgggttaggagtaggtgtgggggaagggcagcacaaatcttccccacctcctaaagcacagtgtggtctacactgggaaagaagctggttcactctcagattacaaccaagcaaagacctgggcaaactcaatacagcccccagcctaaaaccccacctgggacagctgcctgcaaagcagtgagtttatcac

SEQ ID NO: 21 - DNA, 258 bp, Homo sapiens
ggtggggtggagtgaggatgtcctcacccaccttgactctctcggagaccttgttctccttcctgggaacgcagcctgagcctgcctcgtcggaagccctgggactccttcttggattctactttctaccatctccttttaagccataaaactggcactttcccatttattttcatcacaaacaaataaataagagtcaaagcgccccgatccaattgcaaagtgttacattgagtccggataaacagcgagtcctgc

SEQ ID NO: 22 - DNA, 492 bp, Homo sapiens
gactctgtctcaaaataaaataaaataaaataaataaaataaaataaaataaaataaaataaaatataaaataaaataaaataaaataaaatatagcagcctctcaccccactccacctctggactccctgtcccccttccttgctgtatttttctccatagcaattaccaccaccagctgccacactccagagattaccgttcgtttgtctattgtctgtctccccctgctcacaccacccccattcgtgtgtgagctccaggagaagggccggggttgctgctgctctgtgagtcatgaaccgtccccaccccctagtctgtcctacaaatttgttaaatgaatgagcaaataaacatagtggcttcccagctgaccagtgatgaaagcttacactgcgtgatctaggctagtcactgctgtctttccctccctctcctcatcagtgcattgagagatgacagtagctcggcctcttagagcagtatgac

SEQ ID NO: 23 - DNA, 468 bp, Homo sapiens
ggtgcccagccttgctccttccctgggaaactgaatagacgccagggtctcacacctgccccgtgggaaaggctggggtatgtgcctgcctggtgacggtggcagccgcggaggctcgcggatcctgtcccctttgccggccacatgcttctgactcatcagaggaagaatgtggtctttttgggagagagtttttaaaaatagtccaagtcctcctctggccctgtcccactcctccccttctgaccatttcctggcatcagccccagacctctttccactctggttttggggaactgcccctttgcaacttggctgtgaatctgtttgtgaaccttactggggaggagctgtcctgggtgcaggctggtttcagaagggaggggcccagctgtggccgcctcctccccaggggcccgacttgggacgagggatttctgcattcctttggcaactgtgccttgggtc

SEQ ID NO: 24 - DNA, 302 bp, Homo sapiens
gcagatgcaggctgggtgtggagggtgcgagtaggctggagtacaccagggagttcccagcaggccactaggagccacccaggatgcccggcaacctcatgagtcagacaagcagggctgtgtctatctggaagtttccagccaagctaggtaaaacacatggacacaggtaactatgctgtaaagcaaaatccccaagtcctacaatcgtgtcccagtggtgtccctgggccaccactttccagaagcaaagttattttctcaccccgttgttaagcacacagaatagagaaggtacggcc

SEQ ID NO: 25 - DNA, 336 bp, Homo sapiens
ggcaatattcttgaaaagaaagagttcctttctttcttctttccagttacctccttcttgccggttggaatattggattgaaaggtcagagccatgtgctgaggttggggaaacatcccggatgccagccccggactgctagtaagtctaaatctaactgatacaagcaaaagtctttcattttgaagtagtcaaatccagatattttcttctttaagaaattcttgggccgggcgcggtggctcatgcctgtaatcccagcactttggggggccgaggctggcggatcacaaggtcgggagattgaggtcatcctggctaacacggtgaaacccc

SEQ ID NO: 26 - DNA, 99 bp, Homo sapiens
ggcctcagcattcttatcgctgcccagatgaggcctagttaattactgaccagagaacggcggcgactgaatccccggcataagctgttgcctctaaac

SEQ ID NO: 27 - DNA, 22 bp, Homo sapiens
gcggggcggggcggggcggggc

SEQ ID NO: 28 - DNA, 218 bp, Homo sapiens
gctgtcccggctcaacactgttccttagggtttgagaacattttcatgaaatgtgacccctcaaaaaaacaccaaactaccattttaattttaaaagatagcttttcctggccgggcgcggtggctcacacctgtaatcccagcactttcggaggccgaggcgagcagatcacgaggtcgggagatagagaccatcctggctaacacagtgaaacccc

SEQ ID NO: 29 - DNA, 399 bp, Homo sapiens
ggtttgagcccttgacttcagctgtcccagaagccagtccactcccctccacgtattttccaattatgtgggccaataaatcagtctagctttccttaaagttacttgttttctgccacttgcaacaagaagttctgcctaaaacaagccacaataaagggtcagagcccaactccagaagggtagcaaagtctggagtgagatgcctggagctgtgggaaggtgcgcgagggcgggcggggacgtgggcggagctagaggcaggtccggcggtgccgatcaagggtgccggccaatgggagccctgccacacccactgagggactgtgcatttgcgctttgcctgtccggtttcactcatacaagttccccgcctggcccctgtccctgtcggcattc

SEQ ID NO: 30 - DNA, 116 bp, Homo sapiens
gtgggcatggaggacatgggtcatcactgaggctgcgggcaccacgcggggtccggcctgggatccaggctaagggccggcggaagaggccccaatggggcggtgaccccagcctc

SEQ ID NO: 31 - DNA, 123 bp, Homo sapiens
gcaatgggcctgctcgctgtgagatcttcgctgtcttgtggctgagctggagactcaagctagagtgcaggagggaccacccgcgtccgaggcagcgccatccctgagcagatgcatgcacac

SEQ ID NO: 32 - DNA, 355 bp, Homo sapiens
ggcggcagcggcggcggctgcagcggcggcagcagcggcggctcatcaggttgacagtgaaagccccagttcaggccgggaggggacctcctgtggtaccaagagcttggtctcctctccagccgagggagaaaagagcgtggagtgcctgagagagtccccttgcggtgactgcggagactgccaccccttggaactggtggtgagagacagccttggcggtggctcggctgacagcaacctctctactccacccaaacggatagagcccaaggtggaatttgatgctgatgaagtggaggtggacgttggtgaacagctgcagcagtatgctgccccgctgaacctggcccac

SEQ ID NO: 33 - DNA, 313 bp, Homo sapiens
gcatctctctgcccccaccccggtgacccagttccttggaccttgaggagggcagtgcgggacatgccccagcccttctcatttccttagccctttcccactcacttgtccggtgggtccttagcctgggccataagaggctggtctagaaaggaggggcaccaacttacagaaacatgcatgtgacacaccgccgaggacacacacgggtcctccaaatggccacacgggctcattccctcacgctgtgacgggtgcatacctgatcacatgcacatctgaggcacatgcagggacatagatggaaagacac

SEQ ID NO: 34 - DNA, 130 bp, Homo sapiens
gcgctgccccctcagaatattctcattccctccttggccaaatatcccctccccactctcattaagagatactccccaccttggccgggagcggtggctcacgcctgtaatcccagcactttgggaggcc

SEQ ID NO: 35 - DNA, 362 bp, Homo sapiens
gcacagcaccagagagttctttctcaaatgcaaatctgatcctgtcactttcctgcaaggctctctgtcgcactcaggataaaatccccaaacccataactggcatgcaaggtcatctcttgccccgtgtctctactcctggcctgacttctctctgcctcagttctttcaggtcctgcaaaccccaccgctctgtttcatccctgtacctgttgtatcttggcctggagagcttttccctacctcgcccctgctcattgtcctttggccctgctcactctaagtctctgtttaaacactcctgtcttccgccgggcgcggtggctcacgcttgtaatcccagcactttgggaggccaaggc

SEQ ID NO: 36 - DNA, 596 bp, Homo sapiens
gctgccttccacatctccgcagctcttctcccatcacatcagtcacgctgtctccgtcgccagagcttctccccttacgtgggtgcactcattctcttttctgggcaccctctcagtgaaaagactttattgggttcccccggcagcttctctggcattgctagagagtgacccctgctccacccctactttcctcaacatggggccagggtcctgggttgtggtgtctaatcctagagtcatacctggctcttccctgagagggacagggtacggggaggaagcagccaagactggaaggagaaaggagggttcaggcatccctgtcccctgaagacaggagggaccccagcattgtccccagtccttctcgaagctgggggcagggtgtacctggtatgaccccattcccagagcagcaggagggagcccaggcattccacagtcacccaactccagataggagaggtgccccccaacatcgcctgcccgatcgccacgggagcaactcctggaatcatcttctccaccctcatcggaacccccagaggagaaaagacagatcctgattcaatatgcaaattcaagcagatggc

SEQ ID NO: 37 - DNA, 118 bp, Homo sapiens
gtccgccgcgatcgtgtcgattttgcggggccggctgccgcctaggcggggacgcccacggcccaggtcggcctcagtttccaggtagtagacgttgaaggtctccttgcaggtaccc

SEQ ID NO: 38 - DNA, 98 bp, Homo sapiens
gggcgtgatggcaggcgcctgtagtcccagctactccggaggctgaggcaggagaatcgcttgaacccgggaagcagaggttgccgtcagctgagatc

SEQ ID NO: 39 - DNA, 298 bp, Homo sapiens
ggcatctttgacacctgactcccaggggccagtcctggagaggacacctggcctggagccaaccttcctctcctcgctgccaaagctctgctctctgggttctggcactgtctgaaaattcctccgttggtctgctctcggcagagcatagattatcactcttgtgctaattatttttatgattaaaagatgataaattattaaacaaagtctgaaaaatgtgccaagatctgctctgaggctgggcctgagaagttgcccccttggcgtccacgttaattaataaatgagactctcc

SEQ ID NO: 40 - DNA, 638 bp, Homo sapiens
ggagaaaaatccacatttcttagtatagcatatactaagtatggccagactctgggttttgactctcgctgcttgtctccattcaggcaacagcctggctcccaccttggctgcttggttaactttgcatctttcaaacccatctctggactcagagcatcccgaaagtttaccctcacctctccggatggggcggtcattccccagtctggtttcaacatcaccgtccatcatacaatcgccatcacagcattcaccaactcgtgcagtgaggctgttctcgtaatttcccagctattctgggacctccttcctctaatggaccagagctgtggagtttgtggaacgaacgaatgagggctgacgtcacggtagcagatcgcaaccaccactctgggtccagggtcagaaggggtagggaaaagggatctgggcagctctagcaggcaccactcacaggtcgagagcgtgaagcaccacaagagacctggcccaggatgcgtagggccatgggtccgcaccccgcccactctgcccacccccagctcaatcttggcactgcctgcgaggaccctgccttgctccacaccaccctaccctttgtgaaccctctcggcggccgccatcttgcttccagc

SEQ ID NO: 41 - DNA, 109 bp, Homo sapiens
gcggctccctgctggttgaagctcagatgccctcttgtggccgcggccccctcgcacgtcgccctgcgcccggggaccggaatccccgacaaggggtggtcagctcagc

SEQ ID NO: 42 - DNA, 81 bp, Homo sapiens
gcccggccggctgctgggcgagacagggagttgaggaagggcgatcctgctggcgcggacggtgtgggctaggcgcgctcc

SEQ ID NO: 43 - DNA, 380 bp, Homo sapiens
ggcctttgaacatttgggttatttatttatttgcttccagtccttgtgcagttgttaattctggctaaaatttcccagtgccttgcttgcatgtgtggtacattatgtacccatctggcagcaagactgacacctcccctggcaaccgtcctatgaagtttcaaacacacttacatgtttgcgtcccaataacaacaagacagaaagggaacagaaaaagaacaccccggagtttactgcgctgactctctggcggagttaacaacgtctagtctgcaacaggagctcaacaaacatgtgagcaagtgaacttgggccaggcccaaaggccagactgagacacctcatgaagcaaaagaaagatacaggccatggtcacc

SEQ ID NO: 44 - DNA, 727 bp, Homo sapiens
gccaagtcacaggtgcagctgcctcaccctgcagaagcaggtgtgcagttgagctgttcttcaccgggccctctgcttgggttatgctgtggggagagcagcaggggttgacttatttgctaatgattaatgattaatgattcgccagggctacaggcagggccaacccagcctgggaaggcggggataggaaggcttcccagaggagacgtggtttaggcagaggcctcaataagccagggaagggggtgctggtcaagggagaggggagacgacagtctgatttaggccggaggcgtgacagcagggcctcccagggctagcagtgcatcggtgggctgcagtggccatcggggctggggccttacaccttccaccatgtgtcaaaatgagtttaggtctggccgggtgagctcccatctgggtctgtcgtgacgacagctcggggtatgttggctgctttccagagacataccagaggcgccttaatctccctgacacgtcttcccagctcgctggaagctgggcccttccgggaaggttttctgtgggcaacaaatgcagctgatccagctgggtgtggattcctgcgagctttagtcaccgaggggctgtcctgacctcgctgagggctagtcctttcccacatttgcctcagaggatgggagaaagtgactctgtggtggcaactcagacacacgccttcctttttcccttccagtccccc

SEQ ID NO: 45 - DNA, 121 bp, Homo sapiens
gcggggcccgcaggccgggtctgcacagccgcgctcatcgctgccgtcaccacagtcgtcgtcgccgtcgcacacgaacacggcggccaggcacgagcggttgccgcactggaactcgtgc

SEQ ID NO: 46 - DNA, 713 bp, Homo sapiens
ggtgggtgtcatcacttttattgcccaccagcacgatggggaacttatgcaggttgttacctttgatcttgcagatcagctcatagaaggccttcagctcttccagggtttccttcttggtgactgagtagaccaggacgaaggcgtggccccgggctataacgtggcgctgcagagcgcggttgccgtcgccactcttgctgtcggtgatgtgcagggaaagcacaccgtggctgcagcccagcaactggcagtaggtattttcaatggtcggcaggtactcatgacggaagttgccgctcgcccacttgtgcagcagcgtacttttccccacaccagcggtgccgactaccacgacgcggtaatctctgatcttcctgtggggcttgaaggcgcggaggataagcagggcgggcagaagccgcaaccgcttcagcagcttctgttccttggagccaaagctggcgttacccatcgttgggattcggaggggagatacgtgcacaagttctcccacacttagctggcagcaggagacccctaggaagaaagtgagacggtgagagatggtagtggtaacctacaatgttgtcagatcatgtcagcctggccagctgctccactaggactctgaagagagtccaccctgtgacgtaaaggggtgcacacagcgagaagaaaattcccaggcacacagttcagcctgctagacc

SEQ ID NO: 47 - DNA, 1239 bp, Homo sapiens
gtctctatcaaaaagaaaataaaagaaaaaaaattggtaaaggacacacgtgataactgaagtttccagatgtgaagagaattctcattctcaggcagtggacccccccccccactcccctccacactccttccaccttcccaggccacctggcctcaggctgagggggaggtgaaagtttccaggaaccagagggcgtccaaacccagcggccgtgcggagctcaaggtcccgccgctgctgttgcggcaccagcctggctcatggacatcaccacgcacctgcaaggtcaggtttctctctggtggctgtggcggctgctaccctcctcgcccatttcaatcttactttcacactacatgactccactattacttcctgaacactagctacctacgcagctgtaatagtggacactgtgtcaacctttaagctcgcacacttatcaaacctcgttcttctatattaaaaagtgctagcttcccaacgggactatccaaagtgcagttgcaggacctgccaggagcccgcagggctgcgggtggttcttgcgtaatcgcgccaagaaagacctggttccagtttcagggacaactcgcccataaacttctactgcgcaacagcatctgctgctttgtctgacacttgttgttttcaagtacccctaaaaaagcgaaagaaagacttacctttctcggaggcacgaaccaagcagcctagaagacaaatgcgctgctcggagagactgccgcggcaaccaactggacaccccaagagctcactcctccgcggttttatattccgacttgcgcacaggagcggggtgcgggggcgcagggagtgtgggtaacaggcatagattccgcttgcgcaatacgtggtaagaaaccagctgtgaggggctggcccaacgcagagcggcgcgaggtccgcttggcatctacaacaatcgaggggctagtccagaagttcaaggcggggttacaggttggggaggaactgttaaactgtggactttttctcacctgttggaataagcttcaggcaaaactttgccaacaaaaaccggtccaactgattttagacgaaagtccaaaagcagtttaatgcaggacagataatcttttccacaaatgatactgaaaagacaggacatctatagattcccccccgccaaaaataacccttacataaaaattaagtggctagatataactgtgacgagtaaaattacaaaac

SEQ ID NO: 48 - DNA, 622 bp, Homo sapiens
gatactgaaaaggtttacctaggagaaaatatttacaagccatatatctggcatacaaccagtatctagaatatgtaaataactcaaaaatcaattatttttaaaaatccaattagaaaatagtcagaagacataaacagacacttcactgaagatatgcagatggcaaataaccatatgaaaacctttaatgtcattagccattagagaaatgggaatacgaggctttcgttgttcttcgcctcccactagggcgggttgagggtctggctccagtagccccgggtgcctctcactccttgggcgcaatgctactatcctggcagaaccctcgccgaaccctcgcaggacgccccatcgggtccgccagcggctaggaagcccgattgtgtcgttcctttttccctctgcgcctcccaccgccagtcccttttccaaatgcgcctgcgtctgccctccacatctccgagctccgtctggcttctttctcccttgcctgtgagcgcctggcggcggatgcattgaaagctgcgcaccaccgcctaccgagcgttttggggagtgtgtggaagttgttggcagcaggttttgacagcagtaccctatgggcctagtcgttgac

SEQ ID NO: 49 - DNA, 113 bp, Homo sapiens
gtgttccggggttggaacgctaggccccggtggctgggtttgcgatgttgtacctgagcgagttagagaaaacgccacactttgagacgaattaggagtccgtttatttagcc

SEQ ID NO: 50 - DNA, 336 bp, Homo sapiens
gaggctgggggaggggcgcccgccattgcccaggcttgcctaggtaaacaaagcagccaggaagctccaactgggtggagcccaccacagctcaaggaggcctgcctgcctctgtaggctccacccctgggggcagggcacagacaaacaaaaagacagcagtaacctctgcagacttaaatgtccctgtctgacagctttgaagagagcagtggttctcccagcacgcagctggagatctgagaacgggcagactgcctcctcaagagggtccctaaaccccgagcagcctaactgggaggcaccccccagcaggggcacactgacacctcacac

SEQ ID NO: 51 - DNA, 120 bp, Homo sapiens
gtctaggaagtgaggagcgcctctgctcggcccccaccccatctgggaagtgaggagcgcctctgaccggcccccaccccgtctaggaagtgaggagcacatctgcccggcccccacccc

SEQ ID NO: 52 - DNA, 1138 bp, Homo sapiens
gaaatgaggagttcactgatcaagaagcgtatttcagatggcaggagttgcttgaaacaaagttcagagccaccccgcaaaaagatgtccttcctggggaactgctcgatgatgcatagacttgctgggcccccttaggcagggagggtggcacatttgccagatagctggatcacccccccagactcacagtcacgggccaaatatccaatcgaccctttctgtggagattcaatgttgagtgacgggaaaaatggggaaattgccaggaatctttcatgacagtgtaaatccagcttgctgggctcttaaaatgcatgccgtggctttctgatgttttccctatgtcacagaatttacgagtctgatctcacagagcagccagaaagctcagaggcagttgatgatgtatgtggaccgtctggctcctctgagaaaggattcaattctgtctcttaaagtgatttaatcctaaatcttaggctggaacaaatagaaaatgcaaatctgtcttccttgtttaaggattttgtattctttgatagtttcaaaacaatcatgcagagaaaaaaaacatatcttaacaaatatatcatgttggaaagtgtagatgctttgacaaattacaaagccaaccaagtcagatacttccttgtcaacttttgcttccagctggcaagcatttaaaataatattccaaggaggtttaacattcatgattacattgtttgattattgcactttctagataatggtttttcaaaattgtatcttgcagctaaaaattaaatagcgacttctgggtatgcatgacattctttaataaaatgagacccaatataatattctcagaggctgagcagtaatatagaagagatttactgtagtccaaatgagtgagatcactgatcctataggattcttattattttctcaagctaaactccagagaatgctgggaatggagccacagactctgttcatgtctagcaggatcctagatgggctttccttttctacatggatatctaaagaattcttggggtctttgggctgtggaaaaatgccttttaggagaaagctgtggacaaagttgtttatttgtgtccactaacagtggacacaaattgtaacaaac

SEQ ID NO: 53 - DNA, 162 bp, Homo sapiens
gctttcacggtctgtattcgtactgaaaatcaagatcaagcgagcttttgcccttctgctccacgggaggtttctgtcctccctgagctcgccttaggacacctgcgttaccgtttgacaggtgtacagccccagtcaaactccccacctggcactgtcccc

SEQ ID NO: 54 - DNA, 336 bp, Homo sapiens
gcccggctaatttttttctatttttagtagagacggggtttcaccgtgttagcgaggatggtctcgatctcctgacctcgttatccgccctcctcggcctcccaaagtgctgagattacaggcgtgagccaccgcgtccggcccgttgtttgcttttagttactgattgttaaaagattaagctgctggtaagccgacatcaataatccctccggaaaaatcttttaactaagttaataatagaaaaacattggttgcaattgtagatactagtcatttcgaagatgtgtgagagggaggtacagtgggtcccgggtaggctgcaggggtgtgtgc

SEQ ID NO: 55 - DNA, 1117 bp, Homo sapiens
gttcagaacaggcagagagcagagctggcaggaagagagaacaaaaggaagaccaggaagggaagccaggaaaagagattttgcactgtgttattatttcaatcagaagacttaggaacattatttaattatcaaattcgtgtgtctgatgatcctttacaacactgtagcacctaataaagtgttatcagatttctttcttttttttttttttgagactgggtctgattctgtagcccaggctggagtgcaggggtataataatagctcactgcagcttcaaactcctgagtttttttggtttgtttgtttgtttgtttggagagacagtgtctcgaactcctgggctccagtgatcctcccacctcagcctcccaaagtgctaggattacaagcatgagccactgtgccccagcccaacatcagatttcaaaagtactactgatattattatcaccattaaaaatcactgaagtttttgtcacccaaagttttactttgaaatatagaacatttcatttttttcccacacacctcgcatctgatttttgatttttaacatgtgcatggattacctcttattagaaaaaaaaacacgaaattttttggtaaaagaattatccttaagtgggtattttttccctaagtctgaaatgacttagtaaggataagaggtcaaatcatatgctttgtagtgaaactggaactatgatgaataacattagaattctggatgccttccagcagctggaacagggcagacctgaggcgggagtccccacgcttaggggaaggggctcaggcactgggagtcggtcagggctcccagaatgtaaaagatacacatgaaagaaacaaacagtgggactcgggccagagcaaaatttggcctagaacggagctaaaaactgtcatagtggtgggaagaagcagattggttcaacagggtaaccaaatgtgaaaaagaaaagcctcacaagaattaaaattgatggttggaactgggcgctccgaggctgtgggccggtgtcctgccctgaagagcttggctgccagcaggtgcagcgctgccctgggataccagctcctgggatgcgctgtagtatcatcaatcacc

SEQ ID NO: 56 - DNA, 117 bp, Homo sapiens
gggcaaaaagccgaggcggggtgggggcaaaaagccgcggcgggtgaaaagttgcgggggcaggggggaaaaagccacttcggggaaaaagccgcggcggcgagggggcaaaaagcc

SEQ ID NO: 57 - DNA, 130 bp, Homo sapiens
ggcgggggctaaaaagccgctgcggacaaaaagccgcggcggcggcaggggggtgggggcggaaagccacagcgggcaaaaagccgcggcggcgaggggcacaaagccgtggcgggcaaaaacccgaggc

SEQ ID NO: 58 - DNA, 1133 bp, Homo sapiens
gacacatacactctcccaagactaaaccaggaagaagttgaatctctgaatagaccaataacaggctctgaaattgtggcaataatcaatagcttaccaaccaaaaagagtccaggaccagatggattcacagcagaattctaccagaggaacaaggaggaactggtaccattccttctgaaactattccaaacaacagaaaaagagggattcctctctaattttatgaggccagcatcatcctgataccaaagccgggcagagacacaaccaaaaaagagaattttaggccaatatccttcatgaacattgatgcaaaaatcctcaataaaatactggctaaccgaatccagcagcacatcaaaaagcttatccaccatgatcaagtgggcttcatccctgggatgcaaggctggttcaacatatgcaaatcaataaacataatccaacatataaacctaaccaaggacaaaaaccacatgattatctcaatagatgaagaaaaggcctttgacaaaattcaacagcccttcatgctaaaaattctcaataaattaggtattgatgggacgtatctcaaaataataagagctatctaggacaaacccacagccaatatcatactgaatgggcaaaaactggaagcattccttttgaaaactggcacacgacagggatgtcctctctcaatactcctattcaacatagtgttggaagttctggccagggcaatcaggcaggagaaggaaacaaagggtattcaattaggaaaagaggaagtcaaattgtccccgtttgcagatgacatggttgtatatttagaaaaccccattgtctcagccccaaatctccttaagctgataagcaaattcagcaaagtctcaggatacaaaatcaatgtaaaaaaatcacaagcattcttgtacaccaataacagacaaacagagtgcccaatcatgagggaaatcccattcacaattgcttcaaagagaataaaatacctaggaacccagcttacaaaggacatgaaggacatcttcaaggagaactgcaaaccactgctcaatgaaataaaagaggatacaaacaaatggaagaacattccatgctcttgggttggaagaatcaatatc

SEQ ID NO: 59 - DNA, 119 bp, Homo sapiens
ggagtctcgctctgtcggcgggatctcggctcactgcaagctccgcctcccgggttcacgccattctcctgcctcagcctcccgagtagctgggactacaggcgcccgccacgacgccc

SEQ ID NO: 60 - DNA, 147 bp, Homo sapiens
gttggacacagcgcacttggtgcacagcccgcacaggctgccaatgaagatgacgatgagcttctggagctgcccgcactgctgcagcgcccggctggccgcagcccctgtgccaccctccgtggccgccgcatcacccccaccacc

SEQ ID NO: 61 - DNA, 31 bp, Homo sapiens
gccgccgctatccgcctctccgccgctgtcc

SEQ ID NO: 62 - DNA, 518 bp, Homo sapiens
gtgctggactttcccctaccttaggccacatctcactatggagtgaggatcaagaagtaaaggtctgggaaggagagagctgcaggggccagggagactcttcgtgagtcggagagccatcagcggcccaaggaaaagggaggatcgtggggagacgaggggagcagtggagatgaggggagcagcggagacagagtctcacgcacaggtatgcccagacaccctgaacccagttacttaacctcgtcaaccactgtggcatccgcggggtccgtgggcccatgggtcttccgggagggattctgtgtccctgttattgtgtgtcaataggtgttagcctgatatttatatttttaatgagagaaaacaaactccagaatttgggaactgtttttccggttttgctttatacctcttggacactccttcgaaggactggatctgaggggcattggggtgcgactacggtggacaagggatgattaattttcatccaaaaatctttggtggattccccc

SEQ ID NO: 63 - DNA, 413 bp, Homo sapiens
gaaggactgaaaaacaccgcagtctttgaggggctcagtttggagggcgtgcggaggtgtggggtgggagacgggagagaggtgccttgttggctccttggagtggactgataggaaggaaaacacacaaattccatttccccttgcaggctggactgcagggcctaggatggaaaactgggcagtcaaagagcaacaatatgtagaggttgactgcatgcattgaaaattgttatccctcacacctgtaatcccgcattttgggaggccgaggcagtcggatcacgaggtcgggagatgatcatcttggccaacatggtgaaaccccgtctctactaaaatacaaaaattagccgggcgtcttggcgcgtgcctgtaatcccagctactcgggaggctgagacaaggcaatc

SEQ ID NO: 64 - DNA, 271 bp, Homo sapiens
gcctgctggggcccgcgggcctgctgatctctcgcgcgtccgagcgtcccgactcccggtgccggcccgggtccgggtctctgacccacccgggggcggcggggaaggcggcgagggctaccctgcccccgtgcgctctccgctgcgggcgcccggggcggccgcgacaaccccaccccactggctccgtgccgtgcgtgtcaggcgttctcgtctccgctgggttgtccgccgccccttccccggagtggggagttggccagggccgatc

SEQ ID NO: 65 - DNA, 414 bp, Homo sapiens
gggccccctcttcctagtctgagtggggtccctacctctgagggcaggacatctctccctgacctgatctctactcctctggctttgaccctgcttgctctcccccgagggactcagagtctgagaaactcctatggtgagacccctctgcccacccccacagccttccctgctcctgttctctgccccaccctcggccatcccttgccctgagttggggtgggggtgaacattcaggcgtctcagccacagaggtcgggtcccttcctgtctccccatgggaggccagccagggaatgaggtgcccctcagtgccctggacccccattttgagggctgcagtctcttggagtgggtgaggagtcaggctctgcatcggtggtaggcagggagccccgggccccccggcattcc

SEQ ID NO: 66 - DNA, 635 bp, Homo sapiens
gaaggagacatctaagctgggtagttttaggagtagactgagaggctctcatagcgaatggagcgtggtgggcgggggtgggtggtagaggaagagacttctggtggtgacaaggacgacgggagagcttgcccggaatagaggaggtaaccgccgtgtcgggcgtccctgaaatggagggaccagagagaggcccggaggccagaggaagcccttggcccagcgctggggttttcggaaacggagagacggacgggttccggggaagggcaacagtctctttttactcaccctggcggaggttttgatggtggatgaggtcgccagcaaagggagaacctaggagattctctgggtcttcggcaggttggggaaaggtgagaatggccaggagagcggtgatggggagggagagagaggagagagtgagtcccggccagagtctatccccttccgggctttcggcaccagaatgtaagggcagccgagggaaggaagaatagacccaaagtcaggcgagtaactttgttgaaccagccgggctactccaccacactcagaggaggtagcgccaagcttacagaatgaggggtttatactggggagggagtttgagggagttttttggtacggcc

SEQ ID NO: 67 - DNA, 101 bp, Homo sapiens
gccacggctgcgagacccgttccccatcgccgcccccgctcgctgacacacccatcccgcctctcacctgctggtgacacaagtgagaaggctggccccac

SEQ ID NO: 68 - DNA, 228 bp, Homo sapiens
gctcttccctgcctatctcctccgcccgccttctcctcactcgcccaaacagacacagcccagattcttcccctattcctccttttccctccttcctcccaccggcctgcgcccaccgcccaccgccttgaatcgccgctgcgctgcccagaggcgtcctggcctgaacagcccgcccggtttcaccctccaacttctgaccgctgagcagcagcgagcgactcgctc

SEQ ID NO: 69 - DNA, 332 bp, Homo sapiens
gagagcgcgccagacaccagaacttggcagcctcctggtcctgtttctcttcattgccctgccaccgcctctgcccgacgcatttcacttcacggaacaccgccaggcaccacgggcttgcagccactcgcaccaccccttctcttcacatttcaccgcctcgacctctctctctctctctctctctgtctctctctccccccccctcgctggctccccacatccagaaaatgatgccatggttgcccttccagtaggaaggaagtcgcgactccagggagtaactcatcactttcccctagttggtcacacagtccttaacgcgaccacac

SEQ ID NO: 70 - DNA, 47 bp, Homo sapiens
gccacagcaaatctgcccacacgggcattcgggcgcgggccacggcc

SEQ ID NO: 71 - DNA, 457 bp, Homo sapiens
gtgaatgtatgtatgtcctccttatgggaacaacaggtttgaatactgatgaagtggaacctcagagccactgtgtgcattgaactggagtgagacagaaaaatacagcagactcgtaaccaaacagaaagtgccccatcctgttgatgcagcatatattctgagcccaaccagtaagtagcagacattgacatgaatgaatatggttaaaagcaaatgaacagtcatcatagatgtttctctccctgactcggtgactgcaggctttcagatgcacccagcaacaagggaagggggcatctgcataaaatattctgagcagagcatggggagctggttccagactagataaacaatttgacaaacacccaggaagaatgtctctaaccttcataaaactgaaaggacaggcaagaaatgagatggacgacactgtcatggaaattacagtctcagc

SEQ ID NO: 72 - DNA, 50 bp, Homo sapiens
ggggagggcgggggcgcgtggggggggcgggggcgcgtggggggagtggc

SEQ ID NO: 73 - DNA, 161 bp, Homo sapiens
ggacggcgcccacccccagctgccagggcctcggcgggcagggcgcggcgggtgacgggaccgcgcgcagggtgcagagcagggcccgcacgctccgcaccactcgcagcgccatgttcgcaggggtgcgggggtcgcagcgctacgcctcggccacccgc

SEQ ID NO: 74 - DNA, 190 bp, Homo sapiens
gaggcaggagcgggactgacgggctggctgaaaggcagctgagagatccctacccagggctgactgagcgagcagggagaccgcgcgctaagcatgcgttctcagccctcctccgttccccggggacgcaggggctttttccaggaggtcagcaacccgcctcactacacctatggaggaggccagagac

SEQ ID NO: 75 - DNA, 282 bp, Homo sapiens
gtgctgggagaaccactgctctcttcaaagctgtcagacagggacatttaagtctgcagaggttactgctgtctttttgtttgtctgtgccctgcccccagaggtggagcctacagaggcaggcaggcctccttgagctgtggtgggctccactgagtttgagcttcggggctgctttgtttacctaagcaagcctgcgcaatggcaggtgcccctcccccagcctcgctgccgccttgcagtttgatctcagactgctgtgctagcaatcagcgagactcc

SEQ ID NO: 76 - DNA, 107 bp, Homo sapiens
ggccgagatccagcacttcgagttggtccaccccaacgtctactcccatctaccagctgctggagcgcgtggaggagccggtgcttcagaaccagatccgggagcac

SEQ ID NO: 77 - DNA, 92 bp, Homo sapiens
ggggctccccggctccgggacgcggggcaggggacattccacaggcttgtgggcagcctggaccgcaggggacacccggcaccgccggcacc

SEQ ID NO: 78 - DNA, 296 bp, Homo sapiens
gctccagtcccgcttaccagcactgcctggcttgccccttcctgcttcgtctggcctggggcgctttgcgcttggagcacgctgcgttgccgctgtcgcacacatcctacaacctctctcgcagatgccctgcaacctgcctcacagtgcgatgcctgtctctctctctccctcagctcactcccactatctctacggacacatgctctccgccttccgggactagccatggcccccagggctggcttcctccttctgggtttcacaggctcctctggccctgacccctcttgctc

SEQ ID NO: 79 - DNA, 182 bp, Homo sapiens
gattttggcttttcaagctaactcagaaaatggagatacaggccgggcgcggtggcttacgcctgtaatcccagcactttgggaggccgaggcgggcggatcatgaggtcaggagatcgagaccatcctggccaacatggtgaaaccccgtctctactaaaaacacaaaaaattagtcggac

SEQ ID NO: 80 - DNA, 1704 bp, Homo sapiens
gatcctatttgtggcttggggaagaatgctgggggttagtaggcctctctcttatgttcctctccagccatgcagccactctactcctctagctgttcaggtttgtttcctagatggattgggggagggggtgctaggcattgggaaactaggatggggaaggggcagggtccaggggaatgactgagcagactcctcctggggcttggcctgagccctgatgtaaaggcctggatgaggagccctgctggagggctggataattttggattttagaaaagattctgcttcagcctccaagtcagcactttggcatctggagctgtcatgagtgtggcccatgggctgggccaagagtgggcagagtgctgaatcacctagaatctggtccccatggcagcccccatcctgtcctgagccaggttctgctcctgactccttccttggcattttggcatggggtgtgtgtgtgtgtgtgtgtgtgtgtgtgtgtgtgtgtgttgagcagagatgcctcatccctcagtgtgggggagaggacaacaataccccttttctgcctgcctgtgtccctggcatgagggcctagtgcgtctcatctacccttggaaatgtgctgggccctgctgggcctcagtcaaatctccagcaaggcaagggcaagccacagggctttgagacctggttggacaggagtttaattgtttgtgtggagccaaagccagcctcagagcccacagaacttaaagcaataggagaatagcccagggaaaatgtgtgtgaagagtggaagcctctggggataggggccataccagctgtgaggtgggggcagtggaggaaggcaggcagagatctatcctccttctggtttggggatgattggatgtggtggaattgcattgcaggaagaattgaaggagatgggggcctgctacgcagctaatacatttcaccttttgtcttgactgagctggcacttcggagggagtaatttctccccttgtctttggattcaactgaaggggtgtgttgtgtgtgttgtgatgtgtgtgtgtgttgtgatgtgtgtgtgtgttgtgatgtgtgtgtgtgttgtgtgatgtgtgtatagagagagagagagagagagaattatgccagtaaggaaagagactcactcccacttagccccagaaattgtggttgccactgtggaacagggaatggcagcccgattcctgtcttaggggcttagacgaaacccagaggcttaaattgaggcgttaagagcgaattgcagacagactctgtcccttctctgcaaggctttcactttaggaatccaagtgactggactccttcagctcctgtgcagtaaactctgaatgggcctcaggcagtgcctggcaaggggatgtgctgctgggggcactggctgcaccttgctttgtcacccttctccgtcgcctctccagcgtgagagggggtggggctggaagctttccctggcatcagtgcctaagggctgccagcttttcctggtacagggagaaagcattacctgcagccgttgttgagagctgattggattaaggtcctgatgttgaaatgcttgactggagctcaggtgaagtgggggattctaataacagtgtacatatttcccagttttgtgcaatgaatttcacccctcacccccttgtttggcatcagaaagagtac

SEQ ID NO: 81 - DNA, 529 bp, Homo sapiens
gcacatggatgcacacaggtgtagagcccgggcatgccagcagatccttacagtgcgaggaaggacatgacagaccacaaccacacagtgcagctctagataaaaagcaatttcctgcctcggcatctgcctttcttttcttgtgttctcagcttatacccaatttgatgtaggacccagagatgaggagatatggagggggtgagtcaggcaacgagacagaagagagcctttccttaggacagatcacacatgcaccacgaggcgggaaggaggcattacagacgcagggctcactcaccatgaccttgtgctgcccggtgaggttgggaggctcgcagagaagctgggtctcagatacggtgacagcacaaggggtctctccgatgagcacagtgtagttgagtttggcccctccagaggcaggagggcagaggtttttgccctgtagagaatagcagtctttataggcataattgacacatgcacgcacaagttaattgcctacttaaaaagagattaaggagac

SEQ ID NO: 82 - DNA, 295 bp, Homo sapiens
gggcagggggataagggtgcatttacatgcatgtgcgcctgcgcgtattagagaggagggacttccaactggctactgttcctcagcttgtttccaagagataaaaatgacagctgtttggcttagataattaacctgaggaatgcgctgtgtaagactgttattaaggcagctgggcaattaagtttttccccagaaagggagggaatgggggataaataaagcatttaggggagcagacacaacactggaggagacattgtcgggagcagaaatcagggatggaaagctttcc

SEQ ID NO: 83 - DNA, 177 bp, Homo sapiens
gagcggctggccgcctgcggggccgagtaaggacttctgcgcgcgggagttcgaggccctgcggagctgcttcgccgccgcggccaagaagacgctggagggaggctgttaggagggactctgagcttcacacctgtctgctgccgtggttgcagagccctagtcctgatggccccc

SEQ ID NO: 84 - DNA, 264 bp, Homo sapiens
gtcctcagtttcccacaacagaaataccgggtgctgaaggctttttggcttcctgctccctccctgtttacccctttcatcgccctgcttcccaaccgccccctgactctgctccccattttctgcacgcctgcgcccccgctgcagcccgggacctcctcgtgggggtccacgattgtagcaccaccaggtagcggcatcccacctcttccacctcgccgccgccacagcaccaggagcctggcttgctgtgcggggagcggc

SEQ ID NO: 85 - DNA, 83 bp, Homo sapiens
gttgtctgcacgcaccctcgcattgctgtgggcgcggcactctgcgctggtctccaaggtgcccgcatctagctgtgatgcgc

SEQ ID NO: 86 - DNA, 276 bp, Homo sapiens
gcaaacgtgcatgaaatacaacaaattccaaactcagaaataaaaccgagggtcgcagagaggcagcggaatgaagggtggctttggaaagctcgagaaggcgcatcagccaattggtttgtggtgtgaggcgggtgagaatgaatttagaaccaactggatactgcacccctcagtattggggcgtcacagcaccgcggcacccctgcactgcgtacccatcttccccggcacccctgcagccccagcatcccaacactcctgcactctggtgcc

SEQ ID NO: 87 - DNA, 59 bp, Homo sapiens
gcacacacgcacgcgcacacgcacgcacacacacacgcggcttgaaggagagcaaggac

SEQ ID NO: 88 - DNA, 115 bp, Homo sapiens
gagatggcgccactgcactccagcctgggcgacagggcgagactccgtctggaagaaaaggaaagaaacagcaaaaagccaaagaaaaagcctacagcacccggtattcccaggc

SEQ ID NO: 89 - DNA, 50 bp, Homo sapiens
gtgcagtaggggcggacccccagcaggaggaccccggctgcggctgcggc

SEQ ID NO: 90 - DNA, 95 bp, Homo sapiens
gcacgcgcacacgcacgcacacacacacgcggcttgaaggagagcaaggacgagatggatggagagatagaaaccgagggagggagagagacagc

SEQ ID NO: 91 - DNA, 187 bp, Homo sapiens
gagtcctcgggactggagtcgtcgacacgcagcgggagggcattgggaatcccgggtgcacagggcctgttttcccggtggctggcgaagcaatgtccttcccccgggtaaagcagcccatgcgttccggagccgacgtcttggctggcgtctgtggcacccgctgcccctgcccgccccttccccc

SEQ ID NO: 92 - DNA, 283 bp, Homo sapiens
gctggcccgcggccttcccccggctcccgcgctcccgagcttccaccacatcgggcccgctcggagcagggagtgctccgaggcgtcagggcccagggcccacgatcctgggacgccctccggtcctccgccctgtcgcggaggcagcgttttggatccctcgccgcacaggggctcctgcgaggcctcctcttgccccacccacccagagccgtcagggctggccgaaggcgaacagccggcccagccgcgcggggcctttctctcacaacgcccccaccac

SEQ ID NO: 93 - DNA, 468 bp, Homo sapiens
gtcagggcccagggcccacgatcctgggacgccctccggtcctccgccctgtcgcggaggcagcgttttggatccctcgccgcacaggggctcctgcgaggccccctcttgccccacccacccagagccgtcagggctggccgaaggcgaacagccggcccagccgcgccgggcctttctctcacaacgcccccaccacggtcgcttgtcccgaccaagacccggccggggggcaagagggcgtggggtgtagcgggtcggggggtggccctgttttgccccgggctggcactagaggcggcggcctgatctcgggtgagagggcctgagagaaacccagacacaccccaccgccaccaggagcaaatccactcccccacacacagacacacccgggcgcgctcgcacgcgcgcgcgcggacacacacacacacagacacacacgcacacacgcacgcgcacacgcac

SEQ ID NO: 94 - DNA, 181 bp, Homo sapiens
gtcgacacgaagcggggggcattgggaatcccgggtgcacagggcctgttttcccggtggctggcgaagcaatgtccttcccccgggtaaagcagcccatgcgttctggagccgacgtcttggctggcgtctgtggcacccgctgcccctgcccgccccttcccccggtttggaagggtgc

SEQ ID NO: 95 - DNA, 103 bp, Homo sapiens
ggttgagagggcctgagagaaacccagacacaccccaccgccaccaggagcaaatccactcccccacacacagacacacccgggcgcgctcgcacgcgcgcgc

SEQ ID NO: 96 - DNA, 753 bp, Homo sapiens
gaaaatcttttatagtttaagctctcttgagacaaacatcctattacttgctgccaaaagcatattaacttctacataatctttcctccctgtgtctcacccccaataatattcacacaaattagctgtgtgctagaaattttcttgagataggggtttatatctcagaaatataaaacatataatttaacattgactattgaatataacatttttcttttgtcatttctgtctacatttttatttcctaagatatggagtaatttgattttaagcagatttttgcttcaaaggatccactgaccacggtgacagaagcaataacaggggtgtttcaggaacacgatcaggatgtgtaaaagctgcttttggaaaagcactgtaaggaaattatcttggagatgacatgcaaatggagccaacagcttgtaggtaaaggtgcctgggctccaagtcttcagaatctgcaaactctgagtgggtgtgcctgtcctcggggaaaagggctcagggaggtggctttatttcatgctgaggccttactatgttccagattcccccgggggcttggggataaagaattaaagatttattatcgccgctgttcgcaggaggctcagaatgaactgggcagatgtcaagcagagcaagggcagagtggagagagtaaggctccatctttctggttcaaatctgtgctttgcgacccctcaggcccctgatccgtcgcagccggggttcaggagccagcgc

SEQ ID NO: 97 - DNA, 71 bp, Homo sapiens
gcgtcgttttccttttgggtgactcccgtccccctctatcacctcacataactgcatggggtaaagtcggc

SEQ ID NO: 98 - DNA, 229 bp, Homo sapiens
gacgcgcccttcaccctcacgtggtttgccaccaactggaactttttattcttcccgttgtactacgtggggcacgtctgcaagtccacagagaagcagtctgtgaagcagcgatacaggtaggcgcgtcctgcatgaggaggcctcctgaccccgggctgctccatccagcgctgactctgcagagctgcccctggtggcaggcgctgggatgagccggtgggagccc

SEQ ID NO: 99 - DNA, 605 bp, Homo sapiens
gtcttcaccacttccggcttctccatgggcggcgcctccttcttggccttgcgcaggcgcttcagcaggtagtgccgcttccgccgcaggccccggttcagccgccgccgctggcgcgcactgtacagctgcatcagctgttcgtaggacatgtccagcagctggtccaggtccacgccgcggtaggtgaacttgcggaaggtccgcttcttcttctgctctacttctgccatcttgccggatcctcagaaagagctatttgcatatctaaaggttgttttcctgatgaaagcaatcaccattgttaacagatgtgagcgtaaatggctaaccatcatgatcaagaaagtttcagctgataataagcttcagtattacttagataatgctcttttatactattaatattcaaggtatttatttaaaacagaccaatggatttccatgaaaaccttctctattgcctaagtgactaaggttcatgctggcactactagattattttaaaattttcaggaaattcaggcctacttcgatttttaaaatcatgcatcctggttaagttaaaactctatttcactcttctcccaggtcacatttaaaac

SEQ ID NO: 100 - DNA, 677 bp, Homo sapiens
gctcggagtaaaaagggaagacagacaggcagtccaaacaccaccaaatgacagagatgcagaccaagacaaaaggaaaaaacaacagaagggatttttgtccttgagacgtgctatgcaaattcttttcaattagtttcctattaatgattccatcttgaacatttagagctgctcaacccaggcagcatctacgttttgaagtagtaagttctccattcctagcagagtcggaggagaagctcagctgttatccaccagaaattctattaaaaggatgaaaggttgaactagatgacttctcattctgaagactgtaattcagcagaactgactaatccctggcaaatgataccctttctgagtatgcatgtgtcactgaaagtcactcagacaaaccagactatttgtaaataggtctgattatctgcaaattagttgattgaaggttcccgggtatcaagcagggcttattttaagaaattaagttaatttagataatagctgtgttgaaaagcaacaagttcaaaaacaattaaaaagaatgcagcttcccttttatttttttcaactctatattttcttttcaaattgcttctaatagaccatctgttaagaaagcctcttttgaccgggtgcaatggctcacacctgtaatcccagcactttgggaggcc

SEQ ID NO: 101 - DNA, 277 bp, Homo sapiens
gatggagtgaaaatcagtaaggggcagagtaaggactggacatcaggtcttggaaagttctgacccttcccactatgtaaacatcctttctactgagggacctcacggggtgacaaagccttagaggaaatgtacgcagtctctgcatggtcctaagaaaataaaggaaataaagtaagtgttgtaatcctggactggagtagaaagacttcttagggggaggcattttaaggagggtggagagggggatgcttcccgcctccggatcacagtctac

SEQ ID NO: 102 - DNA, 439 bp, Homo sapiens
ggggctgagctgcgtccggcccggcgctcactgcttgtccgagtcgctcaggttcacggacatgcaccggcactgcttcaccttctggattttcttgagtcggaagggtgggtccaggccggggcactcgagctccacgaggacggaggtgacgcgctggggcttgcagaaggcgcaggactggaaggactcctcctccttcttcacgtgccgcgggatgtagaaggagttgcactggccgtagcagaagcggttgaggatggtgcggctccggcagccctcctcgctcaccgtctgccgcagcggctgcgtcttgcaccagtcactcttgaggtacttgcgctcggtgaccaccagggcctcctggctggaggccagcacctccttgatctggtgctgccatctctccgagttgttgctgctgccgtccttgtaaggc

SEQ ID NO: 103 - DNA, 284 bp, Homo sapiens
gcctcggccgcgccatagttttctatttttgaccaacataaacactgtgctgggtctgaatttttcagctacccttcttcagccggcaacacacaggacctggcggggaggtcgctctcaccagtccccactctgacgagaagaccgcccagctccaggcaccgtagcgccccagtgacgtaggcgaacacccgcgcctctgacgtcgccaaaggcccaccgctatggtgtcggcgaaggcgcgcccttgtgacgtcacggaaggcgcgcccttgtgacgtcac

SEQ ID NO: 104 - DNA, 212 bp, Homo sapiens
gggccaggtttgctggtggaaaatgctctgataaacgaaaccgtctcttccacgtcttctccatttgactggcgtgtgaactcgttgctctcgctaaatgaggccgctgagatggaaacatagatgtgtttacggcagggtggcagtgcaggtaacagggaagtccttgctagggacatcagcaacttgcagcttagtggtggagaaagcgc

SEQ ID NO: 105 - DNA, 63 bp, Homo sapiens
gccccctcccctccccctcccccgcgcccgccccccccccgcccccgcccccccacccggccc

SEQ ID NO: 106 - DNA, 418 bp, Homo sapiens
ggaaaggaaagaaaaagaagaaaagggtgagctagtgaaaagcttgccagctttggcgcgtgaggcagtgaggggagagggaggggtggatgctagtctggctgggaacagcctgcggagagaccattatcacagtttagtaactacccgtaaggtgtgtcgcgctttcagagtccccacagcactttcacttctactattttactttcatcctcacgagtctgtagagccggagtatcattagcaggtttttattgatgaggaaaaggaagacattcaagacccatctgggagcctccaggagtcctttccctttgttcttctaagtctagccctggtttccaaactcccctgtcccacccccaccccaagccacccttcctaaatgcctgtcaacaaaagcataaaagtagagttc

SEQ ID NO: 107 - DNA, 124 bp, Homo sapiens
gcggaggccccaccgctgcagcagcggccacggcagcgacaacagcagcgtgctgagcggggagctcccgccggccatggggaagacggccctgttctaccacagcggcggcagcagcggctac

SEQ ID NO: 108 - DNA, 85 bp, Homo sapiens
ggtgcggccctctgaggcctctggctcctggtctggcctggccgcgccggctccgggagctgccattccgccctgacgtcgccgc

SEQ ID NO: 109 - DNA, 265 bp, Homo sapiens
ggccggcggggtccaggctgggggaggccgccgctgccaccaggtccccgaggtagggtaggaagaggttcgccgcggcttcaaggcctgggccgagcgggggagccacagcgagggttccggagcctgcaaggcggagtcccgggctcagctcaccccaggcgcaggcctgagggctgggagggctccgggggctctggggaacaggccggctccggtctccccgcgcgctctcagcgtcgtcaaagtttattatccacggagc

SEQ ID NO: 110 - DNA, 80 bp, Homo sapiens
ggaactgagctcactggctcctctcttccagacggagcgacggggccggccgcagcctcagccacgcgtccctcggtggc

SEQ ID NO: 111 - DNA, 197 bp, Homo sapiens
gccaggtgtccatggtgccctgcccagcgctgcaggctcacccagtgtggacgcagggggcaagggagcctctcctgggtctctgtcgcacgccgatggctgtctatctgggcagggggtggggctggggccttcgccacgggtgtgtctttcctttttgtttcctgacgtggaattctgttgggatttttggggac

SEQ ID NO: 112 - DNA, 409 bp, Homo sapiens
gcgggcacagccaggacagcagcagccatggaggcaggggctggagggatgcagccgcagcccggggcagaggatccccagccatggctggaggccaggagagagggtgggacagatgccccttagaatcagaaggaaccagccctgcccacacctggaggtcagctctggttccagagctttgagagaataaacttctgtcatttcagccacctgggtgtgctcacttgctgtagcggctgaggagctctcacaaacacagccttgctttccacttccctccctcctatttgagatagcaaaaaatggaccattctgtcatttattcatttcagaaacacacacattgtctccattgtgcctcccacatgccaggcagcaaacgaaacggacagagatctgtcattcc

SEQ ID NO: 113 - DNA, 44 bp, Homo sapiens
gggcccaccaggtccagcgcgcggcacagcagccgccgtcgccc

SEQ ID NO: 114 - DNA, 180 bp, Homo sapiens
ggactttcaccctccccagccctcctcctttgcaaatacaatctggttcctggactcgcctcactgcctacaaagaacaagaacaacggtctccacgtcccccgtggggtgcaacgtggctctgcctcacagctcagctctcaaaccgcacatgaaagcacctgcactcatgtgggcccc

SEQ ID NO: 115 - DNA, 205 bp, Homo sapiens
gtgctctgtgctgttgacctcagggctccctcacgtccccgtccctccctggcccctcctgcctgccctcacgccggactccacaccacgccctcctttcacaccaaccttcagggaaatcccgacaggacaggccaaaggactttggcttcttggggaagactgggacgtaaacaagtgtatgatgtagatggtgatatttagc

SEQ ID NO: 116 - DNA, 387 bp, Homo sapiens
gtggtatcgactaggagagggagaacttcctgtgaaaaataggaagtttaatgagacgaaaatagaatgagtgtgataaaaagcggcgcaagggaacggatcagggacagagcgtctcccgtgtctgtgtgtttaagggtgttagggattgccatcaattgagatcgtgtaatgcactgtctacttggacctaatgtccactgtatgcagtgctgagagctacagcaattgaaagataataagaggaaaatgagtaatgaatccgttttattgtatgctgtaaatggcctccattgaaacagtctgtgtttagactggtaataaaaatgagtgatgaaggcagacgtttaacatgggaattggttcaagcaagaaacatattttctc

SEQ ID NO: 117 - DNA, 455 bp, Homo sapiens
gctgctgtgcagtttctgtgcgttcagagcttccacttaatttctcacagtgtgggccttcatagaaggttctttgttgggtcacctcggctcctgcgctcagatgacaataggagcttcaggagctaaaatgaccgatgtgctgtgctggtcagggttcacttgcagacagcagagtctgccccggctagttacacagaggaggattgattaccggctttcagtgactcccagcatcactgcgggggcggggggtgctgaagaaattgaagacactccaggctgcctcccaaagccacacagcagaaaggggccaccaagaagctgagattctgtcgtcaccggagagccgcctgcctgcaggccagccctgcatgtgactgttgctgctgcgtgcacacccgctcagtgctgcccttcatcccacttcccctccccaggtcagttcagaattc

SEQ ID NO: 118 - DNA, 334 bp, Homo sapiens
ggagcagtgcaatcccttccctcacccattgtaagagtcgcagccagctctcctgtaacaaagacaggttagcaagagaaaagcatgacagatttctgtaatcaaagttttatgtgacatgagagacttcagaaatgaagacccccaaacccagggaaatctgtccatttttatgcttagattctcagccgtgtagaaatacgacgggacgagagggtatgacgcaacggtaatagaccgaggggcacccagcagggcctgtctgtttagattcttcccagcctgtctgtgcagcattccttcctcccgggtatagcgtatagggcaggaaccc

SEQ ID NO: 119 - DNA, 192 bp, Homo sapiens
ggcaggcaccggcgccagcacaccgccgccatcctcctcccaccgccgccgccgccctctcctctcctgtcagtggctcaggctccgggactgctccagttttccctcgccgccattttgattcctagagggagcaggaagggctcggcttggactttttgtgtttttttttgttttttgtttttttgaggc

SEQ ID NO: 120 - DNA, 401 bp, Homo sapiens
gttagtagagagagtgcctaatgtctgacagcgcttctgaagaggatataaataggcggtttttgaaattagtcagccatgtgctcacgtccaccaagaagcacatgcaggcaacatgctccaggctgtgcgtgcaagctgttctgtttccagcacaaatgcagaaaaggggaaaaaagcagtcctggtagagtcagtcatcacatatttcagctgtaagtaggaaacaggaagctcacaaagaattgtaatttagaagcatttaaaacaaaacaaacaaacctactccaggcacaaataccagatagctgcaaagccaactgtggtatttgatgacaaattgtttaaagtcaccagtgggtcagagtacaaaccacgcccacgtgaaagtctccctggac

SEQ ID NO: 121 - DNA, 141 bp, Homo sapiens
gccggcgagtacgggtgtcctatgtaagtttctattgctgtagaattgcagctgggagctgaaaatactattcgtgtctgtctggtgcatgttgcctctttcagctgtttttattccctgtgctgaaccaaccagacagtc

SEQ ID NO: 122 - DNA, 507 bp, Homo sapiens
ggtcctctgttagccaggcacaatcgtccctttggccaatgtagaacattccctggaaaaccctccttgtacctgcctcacaccactgcaaaatgttcccagccactgttaaaagatgagcgacccccctccaccaccaccacacgaaaggcaggggggaggagctggggctctacacaaaatcagaggctgagacgggcactcggcccctcctcttcctctgtgaggcctcgtgttcagctctatgtgctggtgtccttgctcccgcagcgagttggaagactttgttgaagacttgaagaaggactccacggcagccagccgattggttactctgaaagacgtggaagacggggctttcctcctgcgtcaagtgggagaggctgtagctaccctgaaaggtaaactttctgctgggtcgggggaggagtctgagctgtctttcctgcggtgtttaaaaatctgccacatagaggattcattcatgtatgcaagtatttattaaac

SEQ ID NO: 123 - DNA, 319 bp, Homo sapiens
ggaatcaggctgggcaggtttcaaatcagtggaatctggcacttctcccacctccaactagtggatctcagagctgcaggactgctcccaacactgcacccagtgttggcccagcttggggctggcattgggggacagcgtgttccgggcgcctctgctcctctgtgctggggcctgcgcctttgctggctgcccactcatagatgtcagagccgcagaacggctccgcagaagccctgcgcaggccctgcctggggctggctttggtgcacatgtgacaagtcatcgtggtccccatggggcaactctgctcttctcc

SEQ ID NO: 124 - DNA, 954 bp, Homo sapiens
gcgccacgcgcagatcctgcaccgcgccgtccagtttgctgacttctgcaaaggtagctgggtccagcagtgagtcgctgtaggagaccaccagaagcgagacgaaattggcttcggtgctcctcctggaggcggagaagcggtaggagtcgttggtggtgaaatggccctgcacgaagcgccgctccgccttggccgggctccccacaggggtgtaatgctcctctaggtcttcctcttcgtccttgggtaggtacaggaagccggtgcccagcgcggctgtcagcatcaagggcgccagcaggaagatccaggggtgcgcgcccacctgccaccccagccactggaaggtgcgggacagcagcccctctaggcagtcggtgtgacagcggtgccggtgcctgcagatggccgtgggttcgggggtttcctcctccggcaggggtgcatcgtccagctccagcggcaggcggggtgcatcgtccagcatcgacggccgggggggtgcatcgtccccctctggcaggggtgcatcctgctccgacgccaggggtcctgagggttcgggggatttcgggggtgccaggggtcccgggggtggctgcttgccttccgactccgattcctgagattcctggtaccactgcggcccggtggcagagtccggtttggtgagcttgggcttctgctccggccccggcctgggcttgggctccacccacggcattgattcttcctcttaggaagcgcaggaggaacagcaggtgaaaagcagctgcggagatcccaccagacggtttcctggccccacccaacgctctcctggccccacccaacggtttcctggagaaattctaggggagtttgccctccagccgcgctccggaagcggaggctgcgttgggagcacgtggtttgccccgtcgcccaactaatctgaaatgtgtttgtggc

SEQ ID NO: 125 - DNA, 831 bp, Homo sapiens
gtttttcaggtgtgaaaatctcttatttttatttatataatcccatatcaattattggggtttttctgtacttccgggagacactgtcaccaaaagacctttaggaaatcaatcagtgtggcagaataaaaagaccgctgttcatcttgcagagaagggctgctacaaatgaaggcagctgctgttcctccttgctaccaattgtaaatgtgagaagtcagaggtgtgggtacgacattgatccttcaggcactctataaatattaattgaaggaaggtgttgataaggcaaagaaacttacacttctacaaatggtgacagtcaatgctccgggctcaattttaaaaagaaaaagacaaacaaggaagtccagatcattagaagggctttcttggcagtgctaagttacagccatcagcagagcaagccctggctaaggctaatgtcacatggtaagatgatttattctttcccctaagtcagccttgaaaatacatttttcaaattgcctgtccacagcgtagttttactgtgacaaggcactcagttccttaacattcacctggcacaacgctctcaacagcaaagccaagtggcagaaagtgctgggccacattgccagggtacatgccagtcggttcaccagagagtttgcaaaccccagctcccgggctctgtctgctgcactgatattctattaaatcccatagaccagaaaaagcttcaatgcttagatgcaagaaagagttgaagtgttcgtggccactaagcccaggactcagccatgacaatgaacggtatcaatgaccagggaaggatatggtgaggac

SEQ ID NO: 126 - DNA, 198 bp, Homo sapiens
gttacaatcagaggtaacaacctgtgctaacctggtttccagcgaaaaggccaaaagtgtactgataacttcggcttcagctgagactgggataacccgcttgagccagtgccaaattccacccatccggcgcgcaagcgagcggggcttctcctccccaaccccggcccaggctgcttctgccgggtcagtgctgcc

SEQ ID NO: 127 - DNA, 657 bp, Homo sapiens
gattatggagctgaaaaattcctattgcttagtgacatagccattgtatgttagggtaatgcatttgtgtgtttctggtgatgctggtgtaaacaaatctgtgctgccagttctataaaagcctagcatgtacaattacatacaatatgtaatacttgataatgaacaactatgttactggtttatttttttgagacagagtcttgttctgtcgcacagcctggagtgcagtggcgcgatcttggctcactgcaacttctgcctcacaggttgaagcgattcttctgcctcagcctcctgagtagcagggaatacaggcacccacgaccacagccagctaatctttgtatttttagcagagatggggtttcaccacactgcccaggctggtctcaaactcctgacctcaaatgatctgccctcctcagcctcctgaagtgctgggattacccacatgagacactgtgcccagccctggtgtatttagtgtttttcataattttagaatgtatgttttctacttacattaaaaaatagttaactataaaacagcctcaggcaggtccttcaggaagtgttctggaagaagaaggcattgttatcacaggagatgacagctccatgcgtgtaattgcccaggctggagtgcagtggcac

SEQ ID NO: 128 - DNA, 267 bp, Homo sapiens
gattaaattcggttccattcctttcgactccattccattcgagtcaattcccttgcaatccattcaattccattcctttcagttcgactccaatccgttgaattccaatatgttccagtccataccattcgagttcattcctttccagtccattccattcgattcccttccatttgattccatttctttcgactccattgcactggattccactccattccattcctgtgcattccattctattccattccattgcataccactccg

SEQ ID NO: 129 - DNA, 59 bp, Homo sapiens
gcggctttttgcccgcgccaccgcggcttttagcagctttttgctcctgccgccgccgc

SEQ ID NO: 130 - DNA, 99 bp, Homo sapiens
gcagcggctttttgcccccgccgcggctttttgcccccgtcgctgcgactttttccctggccgctgcgcctttttgcccccgctgctgcggctttttgc

SEQ ID NO: 131 - DNA, 3315 bp, Homo sapiens
aatgaaaacaagaaataatattaaatatgaacatatggagaacagaataatatttttaaaattttattttctaagtttacctgaaattttaattttggtttcttatgtaataccagagttattaggaagttattagctaataacactattttcagtgatattttaagtatttgtcatagaaaaatttctatttttgaaaaatgtatatttaaaaatacattaaatttgtatatacatcaatcatatgtatcgatttatgttttttttgaattgcaaatgaaatttgtatttttgagttcctggaataaaataaacttgaatggattgtaatatattattcatgctgtaattcaatgtatttgaattctttaagaatgttacatttatagttaacagatattgacctataaattttctttcctataatgatgctgtgagacaatctaagaagaattaaaatttaaattcatgtattcctcctttttcctctgttctctaactgtaatatattttaattacagatggaggaacagatagatgttagataaataggtatataatatatagatcatccaaaattcttattcttatggttttatgtagtcagtatttacctctatttttctgcatgtttatccttccaatttagttcattacttcctgcacctttgatgtcatatacataaacaggaaataacacatggtggccaggatgtagagagagccacaggacttgtgaataaaatccacaggcaaggatgtggcgattcgttttgcaatattggagggaatgccaaaccctatgtttgctgtggaaaagagtatgttagttcgtcaaaacatcaaaatggtattgccatatgattcagcagctccacatctcaggatagcaaagtgactgaaagcaaagtcttgaaaaaatattttcacatccatgtttgcagcagcgttattggcaatagctaaaacgtagaagcaattgaagtgtccaacaacagatgaatggataagcacaatatgatatatacatacaatggaatattattcagccttaaacatgagggaaatattctgacgtatgttgcaacttggaagaaacttgaggatattatgccaagtgaaataagttagtcagtgaaggacaaatacagtataattccatttgtattaaagtggacagaatcatagagatggtacaatgatggttgccagaagctggggggaggaagaaatggagaagtattgtttaatgggtatagagtttcagttttacaagatgaaacgaattatggagatggatggtagggacggctgcacaatgttatgactatatttagtaccactgaactgtacacttaaaatggttaacagagtacattttatgttatgtgtattttaccacaataaaaaaataaaataccttaggaacattttcatgaaaaagcccacataaaattcattttaatgcatgtgtttatgcatagctttctatttttatcttttctctttgtattccaaattaaaaaaaagatgttttaattccaaattaaaaaggtgtttatattccaaattaaaaaaatccaaagttacagtcaactacacaaaaaaagcttagtctcattaatcattatgaaaatgcaaatggtaactgaaagaagataaaactacaattcaaagagaaagcctaaaatttcaaccccccaaaaagtctgagttttggagatctgggatggaatagggttcctaacctgacaacaatgaaacaaccaaactaacttcaaagtcatgactttatttttatagcaacgaggttgccaagaactgagtcaaaatgtgagggaaaacaagcacttgcaaggagaaagaggacagatgcacgtacataggatagatgcaaatagacaccactatgacaagtaaagctggaataatcaataaattcctaaagacaaagtggggctggtcagattgggagaccgctgacagctgcagaaattgggaaagatccatcatcttgaaaactttttccccacaaacccactgtgatctgtcaagcaattggtaaggaatccaagagagtctgtatatgacacagatcagggagagcagaacacttgggaggtgaccaggtcttgggagccgagcccttatgaatgggattagtgcctttataaaagaagctcaatggagttcttgtgtgccttccactatgtgaggacatagaaagaaggcaccatctatgaaccatgaaattggctctcatcaacactgaatttctgagcatcttgacctgagatcttacagcctcaagaagtgtgaaaaaagaaatatctgttgttttttagtcacccggtttatgttattttgttataagagtccaaatagaccaagatattccacttaatatgtaggggaaggcaacaaaaactgccacacttagaatactcctgatgctgggagtatgaaaacaggaaaaacaaaacaaaactgctcttgaaggtgaaggaggaatatcactgagctcaccaacacaaccaggaaaagaacagaagtgtgagaaggctacattcctgagaccctgagaaaaagtacctgcgtaagactgagatgaaattacataccctagttatgattgaaatcccaaaaagaaaagaggaaaaaataatggagcaaaagaaatatttttcaaaataactgcccaaaatattctaaaataagttacagaaaatcaaacttcaaatataggaaactcagagaatgtcaaatagaacaaaaagaaataagaattccatcttgaaaaatctttaaaaaatcaactctaaattttatatcttgctccaaatatatagagatataaataggttatcatcaagatgtggagaaagccatatcatggaaacactaaaataaagctgtggaaggactacattgatattagacacaacagagttcggaacaagaaatagtatcagagatgagagataatagataatagaataatcaattctcaagaagatgtaaacatcctactaattagggtatgcagctaacaacagaacctccaaatacatgaggtaaaacatgaaagaaataaaaggtgaactagaaaaatccaaaattatatttgcagacttcatctcttttgtcttagtaatggaaagactaggcacaaactcagtaatcatgtggaagttaagaacaacaatatcaccaacaagacatccaatcttcaatggcagatactctttcctttcaagtgaaaaaaaaaaaagtatggcatattctctaacaaacccagaatttttaatatttgcg

SEQ ID NO: 132 - DNA, 59 bp, Homo sapiens
gcaaaaagccgcggcggcgggcgcaaaaagccgcaatggtgggggcaaaaagccggggc

SEQ ID NO: 133 - DNA, 1234 bp, Homo sapiens
gagtttgaatctagtaagtacatataaataaatgtcttaaaactcctcttatgttagctaattaagaaacactattgtaatagacattagaaaatattttaataaattgagtggatttcacacgctaaggaaatgatcttacttgcatttgatagttcaattagatacatatatacctataggtagtttaaaatatttctaataaccttatatacttttaaaaagcattgatatctgtttgcactatatggtctatagagtacacataccaaacatgattatagctcttctgctataaacttcaaatgtctaattaatacaaaaatctagaatgagaagagttctttgcatttttttttatcaaatagaatataggaaagatagctgcaaatatacctgacacacttatctgtgagtatggtggtagcctttttattttattttattttgagagagggtctcactttgtcacccaagatggagtgcagtcatgtgatcagagctcactgaagccttcacatactgtgctcaagcgattctcctacctcagtctcctgagtagcagggactgcaagtgcatgacaccatactagctaatttttgtaaagatggggtttcaccatgttgccctggctgatctccatctcctggactcaagagatctggccaccttggcctcccaaagtgctgggattatagttttgaggcaccacaatcagcccagccttaaaaaaggctgactagagatctttatctatgtatatctatatctatctataaaataaacatatgtgcttcttatataaaaatatatattattaatattatataaaatttttttcaaggtagaaatatataaagagggtgcatgtagagcctggggcattgtgtagtgaagctcaaggcctctgaagaaatgccccttgcctcttttgtctgggctagaatccgagaagggaaagcagcagatgcactggttcccaggttcttggcatcctacagagagaaacttgtttgagctagggtagcgttaaacacccttgttcttactctcctgttttatatagtgagcagagactagcttcatgagaacagactgtgacagtcaaggctgtctgatattttgtgcagcattaattgagaaattctagcacctgaagaactctgggccatttgagggtaggtgcaggggaggaaagggaagtttgcatccctcctgctgtggagagaaccc

SEQ ID NO: 134 - DNA, 142 bp, Homo sapiens
gtccagcgggagccccacctctaaagtccatgtcgctcagcatccttccccctgactagtggcccaaacacagcacgaagctgaggtgggtggaacgctttccaaaacagcgctctatgatgagccactgacagacttgctc

SEQ ID NO: 135 - DNA, 109 bp, Homo sapiens
gaccccacccaaactctggcagagtgagccgcaaggctgtggaatctttgaccccttggcacgcgtttaagtgtccctcaaactggccctgacttgatcccctccaagc

SEQ ID NO: 136 - DNA, 114 bp, Homo sapiens
ggagagcaggagggacgcgagggtgaggggctgagccgggggccagggcgtcttcaaggcagcgctttaaggaaagggccatggagttccagctggggcaggacaggaggagcc

SEQ ID NO: 137 - DNA, 363 bp, Homo sapiens
gctatttcgggaaagctggtggacgcttcggctccgaggctggctgggagggcccatagctaggcggcagctgccctcaatctcacagctttaatgaaggagggctgccggatttacattgtttaaacacttaacgaaattagctatgaaaagaaggatgggaggagccctgggtagtgggggaatttaggccttctgtcttcacacactttacacacacacacacacacacacacacacacacacacacacacacacacacacacacacacagtgattttcctaagaggctgccagtaggaactggcaagaaattatgtgcctctttacagcaagattaaaagcaacaacagtgacaaaaac

SEQ ID NO: 138 - DNA, 416 bp, Homo sapiens
ggagtctccctctttctccaggccggactgcagtggcgctatctcggctcactgcaagctccgcctcccgggttcacgccattctcctgcctcagcctcccgagagtagctgggactgcaggagcccgccaccgcgcccggctaattttttttgtatttttactagagacggggtttcaccgtgttagccaggatggtctcgatctgctgacctcgtgatccgcagtgccccttttctgtttctttttttttttcttttttctttttctttcttttttttttttttttttttttttttttttttttttttttgagacggagtttcgctcttgtcacccaggctggagtgcaatggcgtgatattggctcactgcaacctctgcctctgggattacaggcgtgagccaccgcgcccc

SEQ ID NO: 139 - DNA, 121 bp, Homo sapiens
gtcctctcacttgctttgctctagccacctgacttccttgctgttccttagtctcctcaagagtagaacatttccttccatttctgagaggtgacagcgtgcgccctcgctcgctctcggc

SEQ ID NO: 140 - DNA, 252 bp, Homo sapiens
gaacattccttctccaagctttaaaaaaggcaaaacgatactgagaggtgacagcgtgctggcagtcctcacagccctcgctttctttaggcgcctcctctgcctgggctcctactttggcggcacttgaagagcccttcagcccaccgctgcactgtgggagcccctttctcgggtggccaaggccagagcccactccctcagcttgcagggaggtgtggagggagaggcgcgagcgggaactggggctgc

SEQ ID NO: 141 - DNA, 388 bp, Homo sapiens
ggagggtgtactgggtcccccagcagtgccagcccaccgacgctgcgctcgatttctcaccgggccttagctgccttcccgcggggcaggcctcaggactgcagcccgccatgcctgagccttcccccgcctccgtgggttcctgtgcagcccgagcctccccgacgagcaccgccccctgctccacggcgcccagtcccatcgaccgcccaagggctgaggagtgcgagcgcacggcgcaggacgggcaggcagctccacctgcagcccggtgcaggacccactgggtgaagccagctgggctcctgagtctggtggggaggtggagagtctttatggctggctcagggattgtaaacacaccaatcagcaccctgtgtctagctcc

SEQ ID NO: 142 - DNA, 273 bp, Homo sapiens
gtgcacgacccgaagcagggcgaggcattgcctcacttgggaagcgcaaggggtcagggagttccctgtcctaatcaaagaaaggggtgatggacggcacctggtcactcccacccgaatactgcgcttttccgacgggcttaaaaaactgcgcacaacaagattatatcccgcacctggctcagagggtcctacctgcacggagtctcgctgattgctagcacagcagtctgagatcaaactgcaaggcggcagcgaagctgggggaggggc

SEQ ID NO: 143 - DNA, 318 bp, Homo sapiens
gctataacagccttcaaaaacttaagtataatcaatttaaagggctcaaccagctcacctggctataccttgaccataaccatatcagcaatattgacgaaaatgcttttaatggaatacgcagactcaaagagctgattcttagttccaatagaatctcctattttcttaacaataccttcagacctgtgacaaatttacggaacttggatctgtcctataatcagctgcattctctgggatctgaacagtttcggggcttgcggaagctgctgagtttacatttacggtctaactccctgagaaccatccctgtgc

SEQ ID NO: 144 - DNA, 510 bp, Homo sapiens
gtaaagggtctgtgctgaggaggattagtataagaggaaggcatgcctcttgcagttgagacaagaggaaggcatctgtctcctgcctgtccctgggcaatggaatgtctcggtataaaacgcgattgtatgctccatctactgagatagggaaaaaccgccttagggctggaggtgggacctgcgggcagcaatactgctttgtaaagcattgagatgtttatgtgtatgcatatctaagagcacagcacttaatcctttacattgtctatgacgcaaagacctttgttcacgtgtttgtctgctgaccctctccccacaattgtcttgtgaccctgacacatccccctcttcgagaaacacccacaaatgatcaataaatactaagggaactcagaggctggcgggatcctccatatgctgaacgctggttccccgggtccccttatttctgtctctatactttgtctctgtgtctttttctttcctaagtctctcgttccaccttac

SEQ ID NO: 145 - DNA, 237 bp, Homo sapiens
gggccgagccctgagccaaggcggcccagcgattacatcagcaggtgcaaacaagcaggcgggagcagggacgggcgtccctcggggctggagacggcactccatccgccccacacgagtctgtttcattccctccttctagcttgcatcagccttttgcagctctgtgtcatcacagagtgggccaaggcagcagctgggaggctggggcaggggtggaggtgaggtgtggggctc

SEQ ID NO: 146 - DNA, 128 bp, Homo sapiens
gtttccagcccattgcatctcgtggcgtcaccatgaggaactggatagaagccgggcagggacagtggagcagacgttgtgggggggcccaaggggtgtcctcacccagacagatcgcctcccctccc

SEQ ID NO: 147 - DNA, 893 bp, Homo sapiens
gttttgtccactggcagcaagcttaaaccaactggcagtggaactgaaggcaagtgtctaacatttatggaggatgacaccttctatgggagcctgactcgtgacctctgtgggtatttttggcccagagaaagggctggtctgagctgtggctatcagtctaatagtattagagggtcactacagagaaggcagttataaatcacccagagtgggctgggaagtgagtggaacctttctgcctcttttggaagactcaacctggggaaaacatttcatgtcaagggtgggagggggaggtttcttagatccctgggctcggccaaatgtgaagtcagcactcccctcccaacctccccgcaatccagccttcctcctgtcctcccctggcttctataattccgtttgttgtgctcgcaaacaccgtgttggaagatttcatgctaatgaaagggtttcttgattaggttacgctgttactgtaaatgttccctcattatctatgttatggtaggaatttgaaaaagtataaattgagcgtcttgcataatttataaaacctgaatgtttcctaattagttcggttaggttaatgatggtgcagcgtcacttcttcctggtcccgttaatgacctttccactcttcattttgaacactttctgttatttacaagccccctcccaacccaaatccaacaaccagcttccggagtgtggccccatctagcctctgatgggaggatgaaatgccttgcagaatgtgaatggctccttttttctctgcatgtcccccgcccagctttgaggccaagaggcagcctgtttaaaggttggccagcccaaatttggctcaggccaatcccctgaagaatgccggtgaagtgcattctttc

SEQ ID NO: 148 - DNA, 417 bp, Homo sapiens
gtctctttaactggggcagccagcccagccgagccctcctctggggcctccgggctccacagcagcgtgttctcaccagcacaggatgccccacccatggccaccatccagggtgcacatcaggcccctagcaggagccgggccagagaaaacaacgcagcatccaaggaggtccatttcccaactggcagggcctgggagagcgggaggaaaggaaggaagggagccctgaggagccacagccttggctgctcagggttaatcatcataatccttcagtcttttccactccccttgtctgagccactgacagccctgtggtgcatgtgcgtgtctactattttttattcatttatttattttcttacaagacacagtctttcactgtcaccctggctgcagtgcagtggtgcaatc

SEQ ID NO: 149 - DNA, 101 bp, Homo sapiens
gtgatccgcccgcctcggcctcccaaagttgtggaattacaggcgtgagccaccgcgcccggcccagtctatgctttttaaaaacctatttgtggccaggc

SEQ ID NO: 150 - DNA, 246 bp, Homo sapiens
gcacaggaagcattgcaattgcctgaaggaagaaatatccctgaggacagacagtaaaaggtggagatgggaatgctatgcccggccctgaaaactatgctctgtaatttagctgaaggaggcgccaaattagagtggccattcaacagcaccatgccgtaggaggtacgttccacaggtccccagggcacaaacccctggccggcattcctacactgccgggatatccctctctgatacctcccc

SEQ ID NO: 151 - DNA, 175 bp, Homo sapiens
gcccagactggtctcaaactcctggaacttaagttatcgtcctacctcggcccgttaaagtgttgggattacaggcctgagccaccgggccccaacattaattattcttcaagcctattctggaccgggcgcggtggctcacgcctgtaatcccagcactttgggaggccgaggc

SEQ ID NO: 152 - DNA, 197 bp, Homo sapiens
gcagagcagaccaagaagacatttagtgactccctgggaccattccgatagggagaggatgaagccatgatgccggcattggtacgaggctggcactgctgctgcaggtgcctttgttgcactgcagccattgtcaggctgttccactggggttggcggccgcaccaccaggtggtgaagagcactggactcctgcc

SEQ ID NO: 153 - DNA, 191 bp, Homo sapiens
gacccccgccttctctggattttaaagactgtgtaggaggagaaaatggggacgggggtcccctggttaattcatttatcttaagttcccgtaaccaaactagcccctcagtttacgcctttgaccctcaaagttctttccacttcgtaccgtgagatcagaatccctgaaagaagcttcttgccctaccc

SEQ ID NO: 154 - DNA, 220 bp, Homo sapiens
gggaggcttcggattgctgggacggcccgtgactgctgcgtccacatctgcagactggccctgtggatgaggagaccttcctgaaagctgcggtggaggggaaaatgaaggtcattgagaagttcctggctgacggggggtcagccgacacgtgcgaccaggtgatgctcctagccgcccctgaccagcctccctgtcagttgccacccccactccgttc

SEQ ID NO: 155 - DNA, 415 bp, Homo sapiens
gttttctcttaagtcacaactcagcctgttctgcctacacacattaggaggaagagaagacgggtgggagacgcccaggaagcgcctgtcggtgtgtagtagggaggactgggtacagcgaagctgccatgaaaccagcaggctccccccctgctgcgtaacaggcggactcactttgttgtacattttgtctcatctcaacaccgaagtctgaggttcacgtgcactcaggcacctccggttaccgctcaagcagcaaggtcacctgcttacaagttaggaaaaaatcagagacaacaccgcgtagagcgtctgaatagaattgtgtatccaggactggcaagtcagcctctttcgacacttcccaatatcctcaaaaataaagaaaaaatattaatctagagaaggagaagtc

SEQ ID NO: 156 - DNA, 151 bp, Homo sapiens
gtgtgagagcaaagtcacaactttgcttttgtgtttgaacatgagttattggtgtatggagtgtacggagccagtgttcatacccagtaacacataacgaaggtccgggcggtgcagccccagcttggacacgccgtcctcaggagggggc

SEQ ID NO: 157 - DNA, 298 bp, Homo sapiens
gtaacacacctcgattctgacatacaccccaacaaaccagacgcaccagttcacggtcaccccaactcgcagacactacccattcagatggacacttcaaaacttagaatctttagctcacaaagatacaccccctactcagaggcatatggcatacctcagacacggccaattcgaagatgtaaaccccaccacacataaacatccagcctacaccccaactcaaacacacactctgaatcgtaagccctaaagcacaaacacaccaagccatacaaacccttgattcacgacgccc

SEQ ID NO: 158 - DNA, 146 bp, Homo sapiens
gcgcgccaccacgcccagataatttattgtatttttagtagaaacggggtttcaccatgttggccaggctggtctcaaactcctgacctcgtgattcgcctgcctcggcctcccaaagtgctgggattacaggcatgagccaccgc

SEQ ID NO: 159 - DNA, 74 bp, Homo sapiens
gccgacggcgagctgcacctcagccacaatggcgcggccgccggcatgcagctgtgcgtggacgcctcgcagcc

SEQ ID NO: 160 - DNA, 382 bp, Homo sapiens
gccctgctcagcttttacaaggggctccctgtcccttttttcggaggcaaagtcaacaaatagcaaagggcgagcttttttttagcgggccctactgaaatgcggagcccttttccgagtcacgcctatgcatgaaacttctagcccagcgcagagtaatgtgaatgatggggctggtgaactggttccctcccagaatgtttaagggcacagccaacactactgaggccttacctgactgctccacagaggtagttcccccaccacaccccaggcatcttaggtcactgtttcctttctttattgaacttactgcatccagcattttcttatttgttcatccatctcccctccccagtccccttcacccatgtgcgttctc

SEQ ID NO: 161 - DNA, 113 bp, Homo sapiens
gctgctgctgtttcatcaacacatttcagcgacgccggggactgtctgcgggggaaacccactcactcctgggattcaggaaaattggcggttccaatatttgctgtgccagc

SEQ ID NO: 162 - DNA, 1087 bp, Homo sapiens
gtttaaatatctggtggaaaaacaggcaagcattctggaaatgcgcagtcccagcagggaagtaggcctggctgcggggtcgcggcctagggcattggtcgccggatacagagaactagaaaccgggaactgtccagcacgcccgtgcctgtcctggcccttctcccatgcaaggctgagcgcagctctgtccgggctaccttagacagactccatcgtggccagggccgacctctctgcctttcttgtcctttcccgcccgttatcgcaggaaacccccgactctatcgacagcgggaaagaggctctgagactggagaggaaaccacggacctgcagggcccgcctcgcctctccgctaagccaagtggtgttcccaacttgcttcgacttgcttccgtgcgctcaggtcgcctgcccggtccagcagtggtaatggagtggccaggcacgcggcagccactgtctcttaggcatgcgatggcctaggggccagacgctcggtgcagtaccctcgcccggcccgccagcgcccccctccagccgcaggcactgtccctgacgaaggcgaaggcgccagcgaactctcgcgggagtggccaccctggcgcccctcccccgccgggccggggtctgtgccctcgttggtaggcgtaggatgcgcaggatggagcgcgcatgcgcactggccgccagccgaggacggaagtgggcgtccggaagctagacgtgtcccctgggcgtgacttggcactgccgcgtcgcagttgccgcattcgccgcattcgctgcaggcgcgaggttgggtgcaggcagctgtttgagcctcgaggcatcgacggacggacagacggacggactgactgacgatgccgcgctctcacaggcctccgcctaccgcgcagcgggctgccactgccgcagcagccgagcccaagtctgagggcgttgtggctatgactttcaagatttttctcctttttgcagggcttatggttaaagttcctgtggggttatatttttcctgcaaattacttcttttccaaagtctgatgttgatgtcccctgaagacagcggcttttatgc

SEQ ID NO: 163 - DNA, 279 bp, Homo sapiens
ggcaggattccacccaggagaaggtcctggaggtggccatggggctcagcagaatgagccgggaggagcaggactgttgacacgagagcaggggtcaggctcagtgcacaggtcccagtgtgcagagctcacccggccccagctttcatcacccatctgagatcggcctccttcactcctgttctctgggacttccttgtgtgttagagactcgagcaagaccctttcttgtctatccccggacggacccgcctttcccgcatctctgggggtgaggtc

SEQ ID NO: 164 - DNA, 201 bp, Homo sapiens
gcagaagccagggttgcaggcagaatgcaccaagatgggaggtgtcaaaggtgaatctcataatggcaagacaaattgtagtgccgatgtttctactgataattttctggaatgaggtcatttaaactatggatcagccgagggtatgctttgaccccgggtgtgcctcacaggagaccgccaggagcttctgtaagttgc

SEQ ID NO: 165 - DNA, 349 bp, Homo sapiens
ggcgtcacctcgctccacatcctgaaggccagcgccacaatgcgccgctggtcggccacggacagttggctgctcagggcctcgcccagcagccgccagctcagcgtcctcttggagaaggcctgggcagctccgccgtcggggtagccccggggctgccaaccccgccgggacaaggacagcggcgcccgcggggagcgcctggagcgggctctggggggcgggcccgggggcgaaggcggggcggaggggggcggtgggcgcatgtccgggaccccgcagcgcggccggttcatggccgctagggtggccgcgtccagctccccgctggccggcagcgcgttcgccc

SEQ ID NO: 166 - DNA, 42 bp, Homo sapiens
gaccgggctggggctccccgggaacgagtgtgggcgccccgc

SEQ ID NO: 167 - DNA, 27 bp, Homo sapiens
gcgcacctgcgcgagccgaagcagggc

SEQ ID NO: 168 - DNA, 401 bp, Homo sapiens
gtggcctgaattaaaccaggctgggtgtgaggcactgcaaaagcaaacgaaacccacccctgagaagcagtgtggcctagaatcaggtgtctggaatcagggtaagagagcagcttctagaccagaacataaagctaggaagctgtggcctaccctagaaactctcagaacttcactttgcttatccaaagaaaggggctgtcctgggccatctctgggcccctcacagctgctgcacttccgcccgatttcaccccttccccaccactgggcaggaagggctgctgactccgtacaaggctggatcccaggcagggaggcctcctgtttcttggctcagcatttgggccacgtgtctctctgctctggacaccaaatctagagagagtgaggagaggccc

SEQ ID NO: 169 - DNA, 680 bp, Homo sapiens
ggcccagcgagctcaaagcacaaggactcacattcaaaaatcactcttcggcatattgacacttcagttatcaacaactgtttttatctgctgggagggagatcgcagctcgtggggccggagtaagccacaaatcactgccgccgccgcctctctgcattctcttaattgtatgtattctctggataaaatgatcattgtggcctcttgtcttgatgagaaattgacatttctgaggacttctttgggcgctccgagcaagcgagataaggcgtgggttgttttagaggagagcagcctttcttccctttcaggggcctctttactgcttgcgttgacccacttgatgagtatggatttcatgaggtctttttcagcatttgaactataaaaggttcagaatgacaccaccccttatagacaaaagataaccttgccctttgaatatattgattctttattaactaggctgtttaatgcaatgaaatgaggcattagattgaagcccatttcaagtgctttgaataatctttaaaagcttgaaagaccttaaaaggcggcctgacaataattggcatgcattttgaaagaaggcagttcttgcttctgatttgaaacacaaacataaaataatttctccatccccgggttacagggcgttgggtacttgtggcaccagc

SEQ ID NO: 170 - DNA, 210 bp, Homo sapiens
gccagcctccgctgcccgctgtcctgtctgcaggggctgccttccgggattgcccgctctcctgcgtgcaggccctgctgggaggctcagctggccccggggaccgcctgccgggtctgcccgctgtgctgcctgcatggaccaccagcctgagctgcccgctctcctgcctgcaggcccggctgggaggctcagctggccccggggacc

SEQ ID NO: 171 - DNA, 547 bp, Homo sapiens
ggacacctgctggagagggacagacacctgctggggagggacagacacctgctggggagggacggacacctgctggggggacacagatacctgctggggagggacagacacctgctggagagggacagacacctgctggggagggacagacacctgctagggagggacggacacctgctgggggggacacagacacctgctggagagggacagacacctgctggggagggacagacacctgctggggagggacggacacctgctggggggacacagacacctgctggggagggacagacacctgctggagagggacagacacctgctggggagggacggacacctgctgggggaacacagacacctgctggggagggacagacacctgctggggagggacagacacctgctggggagggatggacacctgctggggagggacggacacctgctggggagggacggacacctgctggggggacacagacacctgctggggagggacagacacctgctgaggagggacagacacctgctggggagggac

SEQ ID NO: 172 - DNA, 292 bp, Homo sapiens
gatgcctggtgggggggcttctctgggccctcagctgcccttagggccgcccttccaggtggctcgccacagctcctgctccagtgcccttagcaaacatttcctagacacgtctcctggtccaggcatcgtggacctccctggggtgagtagtcaacacagacacagtccctgcctgctgggagtggccagtggctgagacagacacaacttcagccgtcgtgcaaacaggtcatcttagcagtgaccactgccaccaacgagttgtcacaattctgcaagagctcgtgac

SEQ ID NO: 173 - DNA, 255 bp, Homo sapiens
ggtgtcaccttcccaccgttcccactcctcactggcgttaccttcccaccgttcccactcctcactggcgttaccttccctccgttcccacttctcctcaacggcgttacattcctgcggttcccacttctcaccggtgtcaccttcccaccgttcccactcctcactggcgttaccttccctccgttcccacttctcctcaacggcgttaccttcctgcggttcccacttctcaccggtgtcaccttcccaccg

SEQ ID NO: 174 - DNA, 246 bp, Homo sapiens
gaggaggggcacacactccggtccagggaggaacctgcagatgctgccgcctgagtcaccaggagggcaagctcgtcctttgcacagaccccccaacccccggaagccaaacagaaatgtcactcggggaaccctcctcccccactgcagggagagctggagagcaccgagcattgaaaagaacgacacacagaagggctcctcacatccgggggcccagcctgaccttggtttaaaaggggggac

SEQ ID NO: 175 - DNA, 247 bp, Homo sapiens
gcagtcccaccctggccattgtggaggcctggaagctgcggggcccccgcccaggacagaccagtgccccccaccctcacaagccgtccctctgggctctcccaacactgccggccggtcccaggctctggtcatcagaagggtggccccagaccggtgcccagcccaggcccccaaccgaggccccaggagccgtttcatccccccgtgtttatgcatttttaactaagttcccccaagtccacac

SEQ ID NO: 176 - DNA, 271 bp, Homo sapiens
ggccttgtttcagggaggatggggtcgacccttgcgatccccagaggccccccatggctccttctgggctggctgtcttcctcctgtgggttctgatgccacctgggccgacggcgtcttctcagcccagggcggccgcgcctccggtgagtttcagctgagggcgcgcggccagctccgagcctggctccgggtgcagcaccggcctgggacctctgctgtcccgtgtaggggtgccctgcaaatatgtgatgaataagtgaagaaatac

SEQ ID NO: 177 - DNA, 182 bp, Homo sapiens
gcccgcctcggcctcccacggtgctgggattacaggcgtgagccaccacgcccggccaaaccaacttttttttaaaaaggaagatttcgtttaaaagaaaccaccctgaagggtggagtgtggaactgagcttccgtgacggtcttgagttttccaggccctctgtgggtgtcgccgttgcc

SEQ ID NO: 178 - DNA, 1352 bp, Homo sapiens
gttttcactggacaaggccagaagaaagaacatttagtacaacacaaccatgaggctgcaaatcaaactggtagtgggagcatgcacaaggcttcagtggctgagacactggtggctacccttgggtgtcacttaaaacttcaaggtgaaggacattttttttccagttggctcagggaaactaataaacattagaattgaaatttgtttttcttttcaaaatttctaagacatagaggactctctaaacactccaaaagacattcagatatacatgcagctgaggacctgcctgctctgcagagggatggctgagcagcagccaccagctgtaataactttaaacttctcctctcacagggacaggccactcccacacacactgcttacttcataggctgtggccctcagatgcacctgggggactgctttcctcccatttcattagctctccaagacagtccatctcactctaaaacctacactaggatggtgagttgtagactctcctccattctcccagtgcagtgtgacttccagagagtgctcccccatcctcttacctcaactgatgtgaaaagggccagtgcctgggcagttagatgttcagtgacctcacaggtccagcatgcccagggcctggccccacagcctggcacctctcccctacctggccttcatgccagccttttctcttctgtcaccaatgtcaagtgacattcacctgtgccacactcttatgagtgtggtaagtgatgggtgggtaaaccccagctgagtgcctgtgactctaccctcttacctttcactcaagtgacattataagcataattttacatttgatttaatttatgcataatcttttcttataacatttctgacaatagccctcacaaccaaaggagactgggttacagaacacatgggcaaggctggggtagcaggtttcacttactttattccaatgtgaaatgaagatgtgatggtttaaaaccaagacaaagttgtttatcagctgtggggttgctacacttgctagctcatgctcacttcctttgaaacaaggaatctggagagactatattcataagtagctctttgcaaacccccaggcagaagccccagtcagacacagctccctcaggctctcagggcggcaacttcctcctccatgttgggctctgccagcaggcaagggaagagctccctcaggctcccagggctgcaacctcctcctccatgttgggctctgccagcaggcaagggaagcagcacaggcagcgggggacaggaagccacccggggccatagggatccccaaacgccccagagctattctctgtagaaagggc

SEQ ID NO: 179 - DNA, 43 bp, Homo sapiens
gggacaaaagaccgggactcgggttgccgtcgggttttcaccc

SEQ ID NO: 180 - DNA, 165 bp, Homo sapiens
gccccgccccctccaccgggctgaccggcctgggattcctgccttctaggcctaggcccggtgagagactccacacagcggagaactgccattctttcctgggcatcccggggatcccagagccggcccaggtaccagcaggtgggccgcctactgcgcacgcgc

SEQ ID NO: 181 - DNA, 41 bp, Homo sapiens
ggctcgcctcctctgcgcccccgcgccaccgtcgcccgccc

SEQ ID NO: 182 - DNA, 164 bp, Homo sapiens
gggctgaccggcctgggattcctgccttctaggcctaggcccggtgagagactccacacagcggagaactgccattctttcctgggcatcccggggatcccagagccggcccaggtaccagcaggtgggccgcctactgcgcacgcgcgggtttgcgggcagcc

SEQ ID NO: 183 - DNA, 907 bp, Homo sapiens
gcaatgcccctgtaggcagagccttgacaagtggtacatcacctgggtgatcattgcagggatatgtcacaaagcaccctgtaagcagatcctagagaagagttatatcacctgggtgatcagtgcagagatatgtcacaagccccctgtaggcagagcctagacaagagttatatcacctggttgatcagtgcagtgatatgtcacaatgctgtgtagccagagcctaggcaaaagttacagcacctgggagatcagtgcagagatatgtcacaatgtccccagtagacagagaccaggcaagagttggatcacctcgggatcagtgcagagatatgtctcaatccccctgtgggcacagcctagacaagagttacatcacctcggttaacagtgcagagatatgtcaaaatgcccctgtaggcaagcctacacaagtattacatcacttaggtgatcagtgcagagatatgtcacaataccccctgtaagcagagcctagacaagagttacatcacctgggtgatcagtgcagagatatgtgacaaggcccctttaagcagagcctagacaatagttacatcacctgagtgatcagtgcagagatctgtcacaatgcccctttaggcagagcttagactagagttacatcacctgggtgatcagtgcagagatatgtcacattgcccccataggcaaatccaagacaagagtcagtcacctgggtgatcagtgcagaaatatgtgacaatgccgccagtaggcagagcctagagaagagtcccatcacctgggtgatcagtgcagagttatgccacaatgccctctgtaggcagagcctagacaagagttacatcatctggttgatcagtaaagagatatttcacaatgcccctgcaggcagagc

SEQ ID NO: 184 - DNA, 75 bp, Homo sapiens
ggacggggcgctctcccaccctcaggctcctcggtggcctccgcacccgggcaaaagccgggaggaccgggaccc

SEQ ID NO: 185 - DNA, 75 bp, Homo sapiens
gggggtcaccctgctccctcgtgggtcgccttcgcccacaccggcgcgtggggaacggggcttcccgcaccccac

SEQ ID NO: 186 - DNA, 151 bp, Homo sapiens
gggaatccatcgtcaggccatcacgccggggaggcatctcctctctggggtctcgctctggtcttctacgtggaaatgaacgagagccacacgcctgcgtgtgcgagaccgtcccggcaacggcgacgcccacaggcattgcctccttcac

SEQ ID NO: 187 - DNA, 254 bp, Homo sapiens
gcgcctggggctctcccacagggggctttcgtgagccaggcagcgagggccgcccccgcgctgcagcccagccaggccgcgccggcagaggggatctcccaacctgccccggcgcgcggggatttcgcctacgccgccccggctcctccggacggggcgctctcccaccctcaggctcctcggtggcctccgcacccgggcaaaagccgggaggaccgggacccgcagcgcgacggcctgccgggcccctgcgc

SEQ ID NO: 188 - DNA, 90 bp, Homo sapiens
gcggggggcgcggggggcgcggggggcgggggcggcgcggggggcgcggggggcgcgggcggcgcggggggcgcgggcggcgcgggcggc

SEQ ID NO: 189 - DNA, 215 bp, Homo sapiens
gctctcagggcctgagtggggacaagacctcggtgagcgatgggcccagcccgagggggacgatctgagctctgcagtctggagagtgggaggctctgcagcgggcccggacacaggtgagcccaggcacgccctcaccgccccctctcgacccacagggcttccggcccatcgccaagccggcctacagcccagcctcctggtcctcccgctcc

SEQ ID NO: 190 - DNA, 76 bp, Homo sapiens
ggacgtgcatgggttcaacagctacggtagccaccgaaccctgcagagactcagcagcgggtgagcggctgggccc

SEQ ID NO: 191 - DNA, 194 bp, Homo sapiens
gcctctacgacgagatgccgccgtccgcgctgcagcggctggagggtcgcggccgcagggacctggcgggggcgccgccgggagaggtcgtgggctgcttcacgccgcagagccggcggctgcgcgaggtgggcaccagcctgagcggggcgtggggtgggtgctgcgaccccggccccgctgaccccggcccc

SEQ ID NO: 192 - DNA, 58 bp, Homo sapiens
gtactggatcactgcgcggtgggggtcaggctcaccggcgccccgcactcatgtccgc

SEQ ID NO: 193 - DNA, 216 bp, Homo sapiens
ggaagggatgctgtgaataaaaaataaagaggaaacaaaacactcttagaaattaagactttaattgttaaacgtaaaacaaagaaatcaatcgatggagaaaaaggcacaaagtgaaggaaatctctccagatgttacaaggaggagacatggacacgggacgcgcgggaggaaaaggcggcgcggagacgggacgcgcgggaggaaaaggcggc

SEQ ID NO: 194 - DNA, 93 bp, Homo sapiens
gggagcaaaaggcggcgtggagagacgggacgcgcgggaggaaaaggctcccaaggaagatctctggaagaaaagggactccgtgcaatacac

SEQ ID NO: 195 - DNA, 78 bp, Homo sapiens
gggctcacacacaacttgactcacacgtctcaggttcatgcatccgtcccctggtgcgtctccgggccgccctccacc

SEQ ID NO: 196 - DNA, 90 bp, Homo sapiens
ggagttttgaacccagaacagacagccgccgagaccggcaggacactgaggaggcgtcgaggggctgagtgagggttggacctggtcccc

SEQ ID NO: 197 - DNA, 1531 bp, Homo sapiens
gcccagaattcccgcccctgccctgccggccaatcagagcagggccctcccgagggcccccgcagggcccacctccgccctggacagttccagcacacgtctctctcacccagcacccatcctggaattctccaaagacggcctccccgcacccctcctttggcatccggagacagggctgagcattgccccatcacctccctcagggtccaggacttctccctcccagaccactgtctcccctcaggggacaccatgcctgctgctccctgcctgccagcgccctgcacatactttgcacatggctgggggccagctgcgggtccctggggactcggatggcacagagggccccttcctgccaccatcacggctcagacctcacgttcctggagagtaggggtggggtgctgaggggcagagggaagtgccgcaaaccccctggtgggcgcggtgccagccccccaggccgattcccatccagttgaccgagcttgtgctggtcaccgcggtttccgcaggacagagtccccacagccgctgggcaccccggtcccattcgcggccactttcctgtctgaagaccgcatgttgccgggctgtgcttacggctcgcgggcgcactctactgacaagcggtgggcggcctcacagactctcccaggcccgcgtggggcaccacggttgggagtggagtggagactggcgagtttcgactcccccagccaccccgctgtgggtccgtcggtcaccaccttggcctttggtgagggttgttggggccctgcagtccctggggttcacctcaagtctcgagtgtcaaagccgtgaaggggagcaccagggccaagggacccagagttcacgggtccaatcacccagcaggccctctgggatgtggaagggctggccgcgccttcggcaaaccctctgttcccatggccccaccggaaagggctgagtgcttgcctgctgagcactgaccgccgggctttgtcgtgcgtgaaccccacgacatgggggaatttccatggcatgaaaattctcaggcttttccatgagtggacccccaagttaggagaccaaggcagacccccacattttgctaaaagtggagtccagccttgggtcaccttcagactgtgatgtgagtcaccactgccgcctctcggccatttccgtctccacagccacaaccgattctgtgccatcgctgggagatgggctcactggggacagcacccaagacccaaggggagactcaggaaatactccggaaatacaaatgctccaggcaaggcggctccccaggcccctcgctcctgctccaggcattgtgggaggggctagcacaggatccggtcgtgctgccagcaatgcgcaggcacggggaacacctgtgggcaaattcacctctccacgtgccaactaccgccggccggacgtgatgatccctgagcgtggagcacacccgagccatcgaacatcctaaccccatcaggatccccaccccgtaccgagtccacaagcc

SEQ ID NO: 198 - DNA, 590 bp, Homo sapiens
ggggccacggggctgtggataatgcccgacctgaagatctggtgcggctcccatgagtgtcctattcccagatgacccccgtgaaccctgcgacgcgtggcttgggtgacccgggacgtttccacgggcgaaccccagttggggcgggctcgggctgtgatgtgtgagcctgcactgccgccgcgcggccacttccgattccacaactacaaccaattccgtgccatccaggcggtgagaccgaaggagaagcctccagaaatacccatgtgctatgcaagagcccccgggctctgtgcctgccagagaccctgcgagaagggtttcacactagggccgagatccccatcatccatggaactgggacacctcattgttcccctagtatctcctcccatctccccaaccttcaacagtgcaccctggggtgaatcagacacgtagcccgatatggctcccatgagtgtcctatacctcacgacccctgtgaaccctgtggcgcccggcttggatgacctgggatgtttccacgggcgaaccccagctggggcgggctcaggctgtgatgtgtgagcctgcactgccgccgc

SEQ ID NO: 199 - DNA, 760 bp, Homo sapiens
gggctctgtgcctgccagagaccctgcaagaaggatctcaccctgaggccaagatccccatcatccaaagaatggggacacttcattgtcccccaagtatctcctctcatctccccaaccctcaatagtgcaccctggggtgaatcagacacatagcccgatgtggctcccatgaatgtcctatccctgatgacccccgtgaaccctgcggcgcctggcttgcgggacccgggacgtttccgcgggcgaaccccagctggggcgggctcgggctgtgatgtgtgagcctgcactgccgccacgcggccacttccgattccacagctacaaccaattctgcaccatccgggtggtgagactgaaggggaagcctccagaaatattcatgtgctatgcaagagcccctgggctcttgagcctgccagagaccctgtgggaggggtctcacgctgaggccgagatccccatcatccaaagaatggggacacttcactgtcccccaagtatctcctctcatctccccaaccttcaacagtgcaccctggggtgaatcaggcacgtagcccgatgtggctcgtacaagggtcctacccccgatgaccctcgcgaaccaatgcggtgcctggcctgttgacccgggatgtttctgcaggcaaaccacaggtagccgggctcgggctatgacgcctgagcctgccctgctaccacgtggccacctgtgtttccataccttcaactgattccgtggcatctgggcagc

SEQ ID NO: 200 - DNA, 1463 bp, Homo sapiens
gattccacaaaccgcgggatgtctgctgcacccacattagcagattatctcagccaacacaaggatcctagaccccagaataaagcagcagtggcactcccagctctttagcatctcaagctcctaaattagcatctcaaacctgcactgaatgggaatgttaatgtctggccacttaagattgacaagctcagagtgttcactggggaggcaattgtcagttcagaaaaaggctcgggatttgggggctgtccttagtcggatctgtgctctgggatggatgtggaaagtataagcttttggcggaatttgctgtgctcatcacgcgggtaggcgtgacttgagtcccaggccatgacactgaagccctcagagtgtgacctggggccacgcggccgtggatatggcccgatacgaagacgtggtgtggctcccatgagcgtcctattcccagaagacctccgagaaccctgcggcacctggcttgggtgacccaggacgtttccgcgggcgaaccccatccagggagggcttgggctgtgatgtgtgagcctgcactgccgccgcgcggccacttttgagtccacacttacaaccgattctgtgccatccgggtggtgagacagaaggggaagcgtccacaaatacccatgtgctacgcaagagcccccagtttctgtgcctgccagagaccctgtgggaggggcctcacgctgaggccgagatccccatcatccaaagaatggggacacctcattgtcaccaaagtatctcatctccccaaccctcaatagtgcaccctggggtgaatcagacacgtagcccaatgtggctcccatgagtgttctatccctcactacccccgtgaaccttgcggcacctagcttgcgtgacccgggacgtttccgcgggtgaacctcagctggggcgggcttgagctgtgatgtgggagcctgcactgccgccgcgcggccacttccgattccacaactacaaccgattctgcaccatcggggcggtgagaccgaaggggaagcctccagaaatacacatgtgctatgcaagagcccccaggctctgtgcctgccagagaccctgtaggaggggtctcacgcttaggccgagatccctatcatccaaggaactgggacacctcattgtcccccaagcatctcctccaatctccccaaccttcaacaatgcaccctggggtgaatcaaacacatagcccgatgttagtcgcatgagtgtctatctctgacaaccctcgggaaccaatgcggcacctggcctgggagacctgggacgtttctgtgggtgaaccccagccaggcgtgctcgggctgtgatgtgtgagcctgcactgccgccgcgcggccacttctgattccacacgtacagccgattctgcgccatcagggcagtgagacgggcctcccttggtgaggtcagcaagatgggcc

SEQ ID NO: 201 - DNA, 1328 bp, Homo sapiens
gttgggagcttttggtctagcaaaaggggcaccacagtaaagaaagaactggtaaatgcacatcaaatgtggatattatcaggaaagtttttatactttgtgataatctaagacagaactattctacctggatgaattattctctttcataaccagaacagtgctgtgggaaggcactcttactctcaattttatataaaaggctatttgacctgctcagggaccacagtggggtactgggatctgaacatagtggtggcccttcaagcctactacccagactgagacctgcatctgatcaactctcatctccaatatgaccaagagacttctaccactacctctcacctggcaggtgatcaccacccccaactcagactgcaacctttacttcgccccctaattcctgactcagaatccccacctagaggcagaacttcgacttcaattcctgactcccataccccactgagacctctaaccccaatcccaatctcttaactcagagccccccattcagaacctctacccaaagacagactccagaccctgactccagtcgccaactcggacctcccttggatctcaactcagagccatgatgcagactccagaccgggattcaggtccccaactcagactcccgatcctctgtccctaatgaggccctacctaaaaccaccatgcggactccagacccggactgactgggaccccaactactcagatcccaactcaggcaaactcccagccaggatgtggaccctagacccgaattctgatcccaactaggatacctaactcagaaccacaacggggattcccacctccgatcctaattcgggccctgactcagaaccactaagtggatttccgactccggtcccaattcgggctttgactcaaaaccacaacatggattcccaacttccatcccaatagcgcggactcagaaccacgatgcggattccagactccaatcccaattcagcccactctgaaccaccatgagaactatagacccggaatccgatccttgggacgcggccaggaactcggacctcgaccctggccacgctgtccataaggtgcagatgggagcgcactgcccaggccaggctgcactgctgacgcctgtgatctgggacggccgcggggcacacagctcacctcagcaacgccagtgatcacccgtcccgcgccgtccgcccaggtccgtgctgaccgtgttcaaaccctcccagagagatggggagggccgcgctgaggagagtctgggagaaccgcactgaggagccgccgggagagtgccgcgctgaggagccccc

SEQ ID NO: 202 - DNA, 1396 bp, Homo sapiens
gatgactgacgcaccgaggaggaccgcgctgaggggcgcaccgggagaatcgtgctgaggagccccggggaggaccacgctgagaggcaccccggcagaatcgcgctgaggggcgccctggcaggatcttgctgaggagctccctggaggtccgtgctgaggcgacgcggcgaccgttctgcctggagactgcggcagcgctccgactgcccccgccgctgccgacgtggcgaccgccccccacctgctgattgggcggcagcaggggaaggcttgcggcgggctgctgcacggattggctgggtgcggaaagtgatgtgccgtgtcctgtcattggccgaaagagtctcgttttgatgccacccgggctcagattggcccagcgggtccagcgccgcatgaggcactggctgggtgtgaggtggcgcgagccgccgccctccctgcccccacccgtcgtccctgagcaccaccgggggccggggccagcgccagcctcagcgttggcatcgccggggtgagctggagacacgggccagttctctgcgtgatgtgttcaccaccccggggtgaccgcgtgaggacagcggccgcaccccgacactgctgtgggccctcggtgtggaggcctgtgggcgtccaggccacgcccgagaccagcccctccgccggcgccgctgcagcgaccctcgaacccgggcaaggtctccaccgccgtggcaccgggtgcgggaggcgttttcccccctcccagcgggtccatgcaggggatcgggatgttctgaagcccccactgctgtgcctggaacacccgtgtctgccgctcacccctgaggacttgggacctcagggggtgagtggcaggggtggccgggacatgccaggccacccacctggcaaagggcagcgccgagggcgccccgcgcctgccagcgcccggccgggcccgccctgcccacctcccatcccccatccgggcgtgacacttgaccgcgtctgccggcccctccccttgtccgtcccctccgcgccgctggcgcgcgccttctgaatgccaagcattgccataaactccggggacaaaagcctgggtcacaaaagccccctctagaagttcacaccctgaggcttccctggcaaggctgggggccgtttggcccttccatgtggactgcaaaaacagtgttggaatgcaggactctgggtatgttctcgaaagttgttacaaccccaacccagggttgacctcaaacacaggaggaagggggaggctggagccagccaagcgagccagccgtccccccaccaaggcacgcaaggaggccattcatcttcactgcctctgccgaaaatatacgtctacgggagagccaggaatctctctccaagggtgacc

SEQ ID NO: 203 - DNA, 260 bp, Homo sapiens
ggctcctggttctggtcccggctggctcactcaggctgcctttggaccagattcttgaacttttccaccaaggatgttgctgctgtttgtagcgtcggatcctggaaaatcgctgtgttggggagcagcaggctctcccttgctcccccagggcctgggaaaatcaacccacctctgccccccgaccccagggctgtaacctggtgtctggtagccccactgtgataaaccgaagcccagcacagtttgggactcgcccc

SEQ ID NO: 204 - DNA, 180 bp, Homo sapiens
ggtcatgattgagaggcaatgggtggcgagcctacaggggacgtcgtcgaggagacatgggataactttaagggagaaggttggttgtaaggcggtgggactgggtgagggagactcccctcttcttcagagggaggcagtacagggggagctgaaccggctgagggtcgaggcgaaaac

SEQ ID NO: 205 - DNA, 85 bp, Homo sapiens
gcgccctgcagcggggctccggctgcggttccgtggactcggcgactaggcgccgcctgaccagtaggagccgccctcgacgagc

SEQ ID NO: 206 - DNA, 106 bp, Homo sapiens
ggaagggcagaggatggccactacagtcactttaagaggattcccgctgactcaaagcaaacctaccctttcggtacctcaccaatggcagaacgccggcggcagc

SEQ ID NO: 207 - DNA, 334 bp, Homo sapiens
gaatgtattttcatgagataaagagtaattctgagtgtcccatgcacctggaaaagaggcatttcctcttagagaactttgccagtttaaggatttagacctcttaggtgtgcagacaacctcaactgcctgactcctcttgattcccgctggcgggaagttcccaccgcgcagcctggcaggcgcccctgccaccgtgcactgctgcagcgttcactcggtgtgttgcagacggctccacctgcaccatgtccgagtggatcacctggtcgccctgcagcatctcctgcggcatgggcatgaggtcccgggagaggtatgtgaagcagttccc

SEQ ID NO: 208 - DNA, 261 bp, Homo sapiens
gtctccccacctctgacatttgaaagcacttttactctcgggaattcgttagctctttacaaccaccccgtaaggcaaaaaaaaaagaagggatgtttacatttacagaagaggaaaccgaggcctcagagaagtgatttgccaaagggtaccaagcaagttcgcggctgagccgggtcttgaaccttaggtcttcatagctgcctcctgcgacaaggcgggagcagcgctggtgcagagctctggagcggccggcaagcc

SEQ ID NO: 209 - DNA, 181 bp, Homo sapiens
ggagtctcgctgtcgcccaggctggagtgcagtggcgcgatctcggctcactgcaggctccgccccttggggttcccgtcattctcctgcctcagccttcagagtagctgggactacaggctcccgccacctcgcccggctaattttttttttgtatttttagtagggacggggtttcacc

SEQ ID NO: 210 - DNA, 147 bp, Homo sapiens
gcagcccgcttccggcctcacacctgccaagcatcacacctgccaagcatcacacctgccaagcatcacacctgccaagcatcacacctgcgatgcctgcacgagctgggtgcggtccgcgcagctgcagtaagggggcgacccggc

SEQ ID NO: 211 - DNA, 1059 bp, Homo sapiens
gctggccaggcccataaatcagccggcaggtgctccttaaccttccctattaacctctcacactggcaggcattaggtgttatacttggctgccataaattactcgccaatgaatttatgagcacttactccttaggggcatgcttttgcatcctcctctcactctccttctgggcttccagagatcaagcccgtgctcttggcagtgcctggttccagccagagactccccgtttggcactctatgtgggaccccctgttatagacactaactagaaggcagaggggctttaggggaggggcagggtcagagttaagtcacctcttaactcagctagccaatattcccctctccagaggccattacctggagcttctgtgcatttacctccacaggtaaactgatcctgaatggtaatatcaaaataactaatgggcactaggcttaatacctgggtggccacataatctgtacaacaaacccccatgacacaagtttacctgtataacaaacatgcacatgtacccctgaactgaaaataaaagttaaataaatcatttaaaaacacagtaatatctgacaccatttattgtgccaggcacacatttgctcactgcctcaaattattccaaaagctctggataggagtcatcacccatctcacagacatggaaatggaggcccaggtgagtgatcagacatgattgaggctcccgggcagatggtgataatagctaccttctcctttcttcctggccacaatctgggaagaaagggagggaccactatatagatgagaaaacggaagcccaagtcacacagctcccaagggccagagctgggaacctctggtgtggagagctggtggctcaattaactaacttaaaaaatctaattctgcaaaaacaattccacatacggcaaccacagtaactctgtgaaccagaatatgtgtctcattccccaggcaggttgcaagtcagttcaccgtaataaccactgttgtaggatagtgaaggtgatgatgatgaagcctcacacatgagggatgttaccac

SEQ ID NO: 212 - DNA, 134 bp, Homo sapiens
gacgctgcgagtgtcgggcagactggagaagtcctggaactctttgaattcagtgcggtcctcctcgacctgcgcgcctaggagtggggatggcggtggcgggatcatgcagcgcgcctcgccaccctgcggcc

SEQ ID NO: 213 - DNA, 287 bp, Homo sapiens
gagctgtccgcgctgacgctgcgctccctgtgtggcccggaggaccggggcgccctggaccacatggtcaggatgaccaccagcctctgaaagccccgccgtggccctcccttgccagaccgtgtgcctccagaactccctgtgcctggggaagaggctgctggcggtgcaggaaatcctggcggctcaggaaattctggtgacgcggcgtgggggtggggaggcaggcgcaggaggcgggcgaagcggagggcgcagagcagcacaagtggccctgcccagaggcc

SEQ ID NO: 214 - DNA, 1572 bp, Homo sapiens
gcaaataaactagaaaatctagaagaaatggataaattccttgacacgtacaccctccaaagactaaaccaggaagaagttgaatctctgaatagaccaataacaggctctgaaattgaggcaataattaatagcctaccaaccaaaagaagtccaggaccagatggattcacagctgaattctaccagtggcacaaggaagaactggtaccattccttctgaaactcttccaatcgatagaaaaagagggaatcttccctaactcattttatgaggccagcatcatcctgataccaaagctgggcagaggcacaaccaaaaaagagaattttagaccaatatccttgatgaacattgatgctaaaatcctcaataaaatactggcaaactgaacccagcagcacatcaaaaagcttatccaccatgatcaagtgggcttcatccctgggatgcaaggctggttcaatatacacaaatcaataaatgtaatccagcatataaacagaaccaaagacaaaaaccgcatgattatctcagtagatgcagaaaaggcccgcatgattatctcaataaatgcagaaaaggcctttgacaaaattcaacaaccttaatgctaaaaactcccaataaattagatattgatgggacatatctcaaaataataatagccatctatgacaaacccacagccaatatcatactgaatgggcaaaaactggaagcattccctttgaaaactggcacaagaaagagatgccctctctcaccactcctattcaacatagtgttggaagttctggccagggcaaataggcaggagaaggatataaagggtattcaattaggaaaagaggaagtcaaattgtccctgtttgcagatgacatgattgtatatctagaaaaccccattgtctcagcccaaaatctccttaagctgataagcaacttcagcaaagtctcaggatacaaaatcagtgtacaaaaatcaaagcattcttatacaccaataacaaacagagagcgaaatcatgagtggactcccattcacaattgcttcaaagagaataaaatacctaggaatccaacttacaagggatgtgaaggacctcttcaaggagaactacaatccactgctcaaggaaataaaagaggatacaaagaaatggaagaacattccatgctcatgggtaggaagaatcaatatcgtgaaaatggccatactgcccaaggtaatttatagattcatggcatccccatcaagctacaaatgactttcttcacagaattggaaaaaactactttaaagttcatatggaaccaaaaaagtgtcagcatcgccaagtcaatcctaagctaaaagaacaaagctggaggcatcacactacctgacttcaaactatactacaaggctacagtaaccaaaacagcatggtactggtaccaaaacagagatatagatcaatggaacagaacagagccctcagaaataccaccgcatatctacaactatctgatctttgacaaacctgagaaaaacaagcaatggggaaaggattccctatttaataaac

SEQ ID NO: 215 - DNA, 83 bp, Homo sapiens
gcccggcagctccccgctgttagcaccagaaatagttatctgctaagaaaacgaaaagtgtaatgctggctttaccccgcgac

SEQ ID NO: 216 - DNA, 142 bp, Homo sapiens
gcgcagctcctccctggcttccactgggagacaggggactcccatgagaaggaaggagcagggcagtgattgcttagtttatcctgggacgcgggagctgtccccgtggactgagtggcgcggagaggggatcactgagacc

SEQ ID NO: 217 - DNA, 449 bp, Homo sapiens
ggactctggcaatgttgcccaggctggaaggcagtggctattcacaggtgcggtcatagcaatcatggctatcacaggtgcatcctggaactcctggcctcaagtgatccttctgcctcagcctccggagtagctgggacttaaggtgcgattctatagaattgggcagtgcctcatactataaaatataatggttgttccaatgagctgaacaggagaacttggttttatagacagaaaaggactgaggaaaacaggaacagagaacaaaaagcggattggtcatttggtaatttcaaaattacttttcttgtaaaggttaaagtggaggggacttatcatgccacctaaaacttgcctgtttgggaatttagctcccccctacacacacacacacacacacacacacacacacacacatacacactcagaaggtcgtaaagatcttc

SEQ ID NO: 218 - DNA, 247 bp, Homo sapiens
ggtggcggcctgggaggagctgagctcgggcaacggcactgcccacgccagggcccaggaaacgtggcggccccgcagccggaagcgcgagcctcccgagcgctgcagtagcagcagtggtggcagcagcagcagcggcgacgaggacggcctggagctcgacggggcccccggcaggggcaagcgcgcggcgcagcctgtggcagcaggcaaggtgggcggtgcggctgtggtggtcgccgaaccc

SEQ ID NO: 219 - DNA, 601 bp, Homo sapiens
gaggcctgggaactctcctccgcctggtgaccccagccccttctctgaaccgcccagcctctgcctggctcccacctccagccactgttcctctcatcagctcttgatactggataatgaagttgctaaataattcattgggattaattaaatgccaattcgtcgatggtatcacagggtaaccagactgggaagggggcaagggagagaagccagccaggacccagatatccaggccccaagccctctccatccaagcagggactcaggcatccaattctgtgtctccagttcccccgaaaccacgctcaccccttcccaggccccagcctcactgcttaccaacccaggtcctttctgaagctaaatgtctgtcatcctcaacttccagctctcagtgctcagcctcaggactggccccactacctgggctctctttacccctcagttccctctgcccaccccccacccaagattgggggagccaccaggaggcaggcaggctcatttgcataaaattgcctttctgaaatgattacccttgtaacgggctgtcagagagcaatttataccccacgccggggaggggaatttgcatctc

SEQ ID NO: 220 - DNA, 136 bp, Homo sapiens
gaggtaggaatataaaaggcccctggcctacccaagttttggtccagcaggggagccaggccgggaaagggccaagctgccacactcggcttgtggggctgtgtggtgccgtgatgcagctgtgggtttggccacc

SEQ ID NO: 221 - DNA, 431 bp, Homo sapiens
gttaagacaatggtttgttccaattaaattaaacagataatactcttatcaccccccttggacatgtacaataagacccctctttctcccctcaaggaatataaaattgcattgataactgcactgatgagcaacaattacatttgaaacatttaaaacctgagagagaaacccaaatatgtttaagcactcacgtctacactcaaaatgccctgtgaactctagtgtaacacagattgctcagtggtcaacagtgcatgatctagctggctctgatagggactgacgccggctgctggcttttaacgggaagtgctattcttgcccagggcagagagagctacatccccgctgcctgcttgacggacagtcaggggcttttgttgttggtttgtttttgcttttttttttagacggagtctcgctctgtc

SEQ ID NO: 222 - DNA, 156 bp, Homo sapiens
gcttacccggtgtactgcagcggcggcggcttcctcctgtccggccccacggcccgggccctgcgcgcggccgcccgccacaccccgctcttccccatcgacgacgcctacatgggcatgtgtctggagcgcgccggcctggcgcccagcggccac

SEQ ID NO: 223 - DNA, 306 bp, Homo sapiens
gatctcagctcactgcagcctggaactcctggggtcaagcggtcttcccacctaagcctctccgtgctgggactccggacgcgctccacctcacgcagccgtattcctgctttcaaagcagatggaagaggtgcgccaggacccccagttcttggaaacagacctctccagttacctgttgtttcctcttcacgaagagtgcatgtaacagtaagacacaactgtttcatattatacgtaaagagttcatgccaaaggttatagacagtcacatgctaaaactaggctacactttgaagaatcacc

SEQ ID NO: 224 - DNA, 157 bp, Homo sapiens
gggctcctggcgcagctgtggcgcgcacagcccgccgccatcctgccctgcctcaaagagctgttcgcagtcatctcctgcgcaggtgcgtgtgcggccggggcaggagcgcgggcatgcggaggtcctgggtgggcgcttgggtaggtggctgtac

SEQ ID NO: 225 - DNA, 412 bp, Homo sapiens
gggcggctgctgctctccgtttatcccaccactgccaccattattgctactgttcagcaggtgctgctggtggtgatggtgatagtctggtgggggcggtggggctgctgttgctgctgcttgggaggccgcaggaggggcagcagggggcggtggaggggctgtagtggtggcagcagtggcggtggccttggtgtgtttgccagctttccttgccccctggccatgctgtacaaggctcaggagctgcaaggtgctttctctttcccggtctgagctctcggccctacctcgttcatatcgtccttcacagctcaggtggtgttggcggcagacagcgatccgagcccggaggcgctccacgatagcactgtgcactctcggggtgactgagccccctccaaggagcccc

SEQ ID NO: 226 - DNA, 479 bp, Homo sapiens
ggtgtggatgtcctttctgtttgttagttttccttctaacagacaggaccctcaactgcaggtctgttgaaataccctgccttgtgaggtgtcagtgtgcccctgctggggggtgcctcccagttaggctgctcgggggtcaggggtcagggacccacttgaggaggcagtctgccggttctcagatctccagctgcgtgctgggagaaccactgctctcttcaaagctgtcagacagggtcatttaagtctgcagaggttactgctgtctttttgtttgtctgtgccctgcccccagaggtggagcctacagtggcaggcaggcctccttgaactgtggtgggctccacccagttcgagcttcccggctgctttgtttacctaagcaagcctgggcaatggcgggcgcccctcccccagactcgctgccgccttgcagtttgatctcagactgctgtgctagcaatcagcgagattcc

SEQ ID NO: 227 - DNA, 247 bp, Homo sapiens
ggcccggaatcagctgacggggaacctgatcaccgctgctcagtcaggtttcttgttgccaggctgcggtttgtgaaagggttcttgcagttacaaggctgggccacttgtttctgggcggcgccactgccttgctgtctcagctatgtgcaggctggaaaaaggggtgcggtgagctagagcagggataccattgccaccactgccagcagctccagcccggaaggacccctgtccctctgccgac

SEQ ID NO: 228 - DNA, 276 bp, Homo sapiens
gggttcatctcactagggagtgccagagagtgggcacaggtcagtggatgcgcgcaccgtgcgcgagctgaagcagggcgaggcattgcctcacttgggaagcccaagaggtcagggagttccctttctgagtcaaagaaaggggtgacggacggcacctggaaaatcgggtcactcccacccgaatactgcgcttttccgacgggcttaaaaaacggcgcaccacgagattatatccggcacctggctcggagggtcctacgcccacggagtctc

SEQ ID NO: 229 - DNA, 304 bp, Homo sapiens
ggccgagcctctagcttctggcgggtaacacgtaaaaggaaaatggaaacagattacagtcagtctgatatccacataacaaatagggatcccggagagaaatttgttttattgatgtttgggaagagatccactgatttccttgtctgctctgccttgccactttaattgaagaaggtgctagttaaccgctaaaggaaaaataaaatgaaaggaggtgcttaatggctggcactcgcctgctgccgagcacatgcaatcaggcacacacgcccgcacacactctgcagtaaactcccttccc

SEQ ID NO: 230 - DNA, 224 bp, Homo sapiens
gcatgtcccacctccagccctaaggcgtttttccctatctcagtagatggaacgtacaatcgggttttataccgagacattccattgtccagggacgggcaggagacagacgccttcctcttgtctcaactgcaagaggcatgccttcctcttatactaatcctcctcacacagaccctttatgggtgtcgggctgggggacggtcaggtctttcccttcccac

SEQ ID NO: 231 - DNA, 547 bp, Homo sapiens
gctctgtggcatatctctcttactctgtctgccctgctggcttgggctgtccgttcctccatgtctcattccatcagttttcacctcaccctctgctgggccctggctctctattctgcttctcacttgttttggacttctccctgccccctataccctgtccctgtgtccccgagctggggtcatgcctggggtcatgtctgccctcttcttaacattgaagctggttcttgagaaatacagaggcttttctgctttttccaggatgagtcaggaactcctggagtgagaagggctcaggcctcacccagcagtgacctcagagagggtgtgcaaggtcagaagagcctccagctgagctcagcactgtgacaacagactttccaaaatatgcttaagggtctggccggggctggacatgctccagcaggtgtcagggaagaagaatgagcaagctggctgagtctgagcctggccccgcctaatgttgtctcctccctgaagcctcccctcccttctgtgctaccacagttcttaggtctgtggc

SEQ ID NO: 232 - DNA, 193 bp, Homo sapiens
gtttcacccttcttcctaatcaccgcgggcgtgatggaacaccttgacattctttaacgaaagttcaactccactgccactcggggcgctgcatgaggaatgaggtttatgttgaatcccagaatcacagaaattagagatgaaaaaggacgctgaggtcagaggcagcccatccccatggggccaagtgcac

SEQ ID NO: 233 - DNA, 636 bp, Homo sapiens
ggcccatcactggggggcgggagcagccttgggatcagttttcctattacaaaaccatgttcaaatgtcaattccttctctcctgcatgtgggtttctccccctccatttcatcagtccagccccctcctccctcctgttcctggcttgcatttcacgttagcgcaacgctggtctttgaagaatgaaatttggcagccatcgagtgcctaatatgacctcatcctatctggtgttttcaggaaagggtgcctccccaaagggggtggggaaaggcccacagggcaagtggcagggaaacccagctgtgatgcctgtgggtgctccagagttaaaagagtcctcctgcttatgtgcaggggcaggggctcctctcctcagtctgcccccaagcccagctccccaccatctctagggaagaccactagcacaggccaatgctggtactttccagaaaactcttcaaagttccctcagtaccaacacgtgggctcccttccagtcattctggggtgctgggaggtcactggttaaaagcaggctgagagggcgctgttgagcccacctcaccggtgggggcaggtcttccccacagtgcccgggacacatggctgtcttaggaaggacaggcctcccc

SEQ ID NO: 234 - DNA, 404 bp, Homo sapiens
ggggaggtgtggagtgggaggcgcgagcgggagccggagctgcgtgccgcactcgccagctggctcggtttctgggtgggcgcgggctcagcgggccgcacttcgcgcggcggccggcgcctgatgggcttgatcagggggacgagctccctttgggctgctggagagccggggccaggtgccgcaaagtcccactgcaagtgccattgagaggtgaagccggctgggcttctgggtcgggtggggacttggagaacttttctgtctagctaaaggattgtaaacgtaccaatcagcattctgtgtctagctaaaggtttgtagatgcaccaaccagccctctgtgtctagctaatctggtggggacttggagaacttttgtgtctagctaaaggattgtaaac

SEQ ID NO: 235 - DNA, 182 bp, Homo sapiens
ggcgttgctgttggacatcattcagaagtccccgctcagcgggggcagcccgaagagcaaaacaaacagagcgaggagtagtggaaaatgctgagtcctggagctggccggaacggccttcgcctttccacgcccaaagccagccgctctgcccacctgcagctgcaatagcaagcagggcc

SEQ ID NO: 236 - DNA, 392 bp, Homo sapiens
ggaggggatgggcggcccccacctgcggcccccaggagggacgcggccctggtgagtgaagtggaaaccttcctggagcgtcacattcagctgagtgcaagggtggctcccgcagcccctgcctgtccattgtgtttgtctccagtccatggagttttcattattcattattcgccgggcccgggcagcacagcagcgcccgtgtctgtctaatccctacctgataatgtgtttctgataagcatgacggagcccagtgctcctgacaggactcacatttccagccggatagagcgccatttacatgaggcaggcactgtgaattcagatcagggcgatacgggcagcggcgggctctgctggtgctggctggggactatcgactggggtcc

SEQ ID NO: 237 - DNA, 381 bp, Homo sapiens
gcccctctccgcatacagcccccacccttctcagcagccttcagccgccagcgtgtgctgtgaggccctttctcttccaggcatctgtcccttgcatcccaacgggagcgcggtcccctgggaggcgtccctcagcagccccgggaagttctgtccctgctcccgagtgtgcccagagtcctgccgtttccttctagcgcgcgttctttactggcgccattcctgctgctaagagccctgagacggccgggggtgacccgggcccagagcagctcccggctcagggacccctccccaggccaagggcaggacaagcccgggcctgggcctccgcctcggctcccctccagcctctagaggagccccgcgtccgcacgaccc

SEQ ID NO: 238 - DNA, 505 bp, Homo sapiens
gccaggcaggaggtgaaagtggcttctccaaggcagtggtggcagaggttatgggggaaagtcaggcttggggtctgttttaaaggcaaagccaacaggacgagctgaggaaggggatgacacatgctgttcctgtggccgctcctcactgacgggctgcagcctggactggggagaccacatccactctagggacagacacacacctcgaagaagacagtctgagctacagtcatcaggctgtgtttgtttccagcacttaaggatataaacaccagcccagcaggttgtgggaagtggccatgggcttgaactcagcccgtccagctctgtctggcctctagcattataaattatgtagctgtcttcatctattattcagcataatttattttggacatttgcatcagcaatttatatacaaaataaaccagatgccaaaagagggaggagagaattaaaatggacatgcgtggaggtggggggagcaaaggggggccgagcc

SEQ ID NO: 239 - DNA, 414 bp, Homo sapiens
gaggggctgcagagccggcggccgcggtgggcaccatggagggggctgccctgggcagcacgggcatgagtctcaaggcccaggtttgagtaacaggtgttgagagcttacttacttttcctgagacacagtttcctcatctcgagagcacggaaaatcattctaacttcagaggattgttgtgaaagttaaatgagattaaagaggtaaagcccatgacgtgcttagctcgtgcttggctcttggtcaatgccagttagcgctgcattttctcccctctccctccctccttctctctttcttttcttctattctccattcctgttttctcccccaccccactccccaaagctctgcgttgagaaccagatgctgtctggtgggttagggccagaggaggaaaagctgcccgcc

SEQ ID NO: 240 - DNA, 237 bp, Homo sapiens
gcctctctgagcggcgtaaggggtgatctcacaaaggtttactacagtaaaggagagctatgtgagtcaggcaccgcctctctgagcggcgtaaggggtgatctcacaaaggtttactatagtaaaggagagctatgtgagtcaggcaccatctctctgagcggcgtaaggggtgatctcacaaacgtttactatagtaaaggagagctatgcgagtcaggcaccgtctctctgagc

SEQ ID NO: 241 - DNA, 591 bp, Homo sapiens
gtatgtgcataatctgtacatatttatgaaaaagagtggtatttccatatgtgtatataatgtgtaatgatcaaatcagggcaaagactaatttaaagtccagaatctggtctttcttaatcctttatcctggctgttctctccttgccccctggcgacccaggggaatagtgaccagatttgcacagtgatctgtggggaaagttaggctgtgcttttgcaggctaatggttgggggagcagcggcggccggagctccgggctgttcttctctgccactaagcaaactcagctccttccctgggcggcggcagtggtactgtctgtgctgttattactacgatgatcactttcatcatccctattaccaacttgttacaattcagggaggggaaaggctgctgcgggaacagactcagtgtatggccaagcagagaagtccgtttactgaccactcctggctttaaaaaggcatgaagcacagtctccggctctctgggttggaaataatgctcaaatctgaattctgtctatgtgacaagcccattgttgcccattcttggtgggaaccccttcaatgactggaaactc

SEQ ID NO: 242 - DNA, 620 bp, Homo sapiens
ggggagcacagcatctactgcatgttttcagtcgagctggaacctgagtcaaaaatcacatcaaatatcaggcattccactgggaggagacgatattgtgactatgctttggaaaggacaaggaaaatataagactttcttaccaatagagagccctcccactcctcctcctccatgtcttaaatttagcttaaaaacataattgtttttttaaaatgaggaaaggcacatgtccattcccatagatcgttagcatcgaggagcagacatttatttctgtgccgtgcctgtcgggtctcaaatctggctttggcagcctcccaagtcatttttatctggtgggacagaaggacactcctgcaagccatgctccagcctcggcttcctctgggttaggcacattccacgctaaggtctgggcttcacttggcagagcagcagaagcagattcccttgctctccagccatcaccatcctgccggggggtggggtggtggatccaggggcttatatctgtttgcttagatcctgggtcctcaggagctggtgccaggaccggtgggagactgggctccagccatctgtcacgtgaaatggtctgggccacatataaaagacac

SEQ ID NO: 243 - DNA, 497 bp, Homo sapiens
gcagcccgctccctcagcttgcagggaggtgtggagggagacgcgcgagcgggaaccggggctgcgcgcggcgcttgcgggccagctggagttccgggggggcgtgggcttggcggccccgcactcggagcagccggccggccctgccggcccggggcagtgaggggcttagcacccgggccagcggctgcggagggtgtactgggtcccccagcagtgccagcccaccggcgctgcgctcgatttctcaccgggccttagctgccttcccgcggggcaggccttgggactgcagcccgccatgcctgagccttcccccgcctccgtgggttcctgtgcagccggagcctccccgacgagcgccgccccctgctccacggcgcccagtcccatcgaccgcccaagggctgaggagtgcaagcgcatggcgtgggactgcagcgccggtgcgggatccactgggtgaagccagctgggctcctgagtctggtgaggac

SEQ ID NO: 244 - DNA, 885 bp, Homo sapiens
ggtcatgtcattgttgccttaaccaagcctcttttaatttttcaaacggaagagcccctgtccctcagttactgctgctgagccctttcaagatgactcagtgaggagggggaaaagcagaagcggtgtgggaagaggcggggtctgggccagctgctggtcctgctctcctccctcctttggcctctaggctcccaggagtggtttggaacctgcgccgtgtgctctgggggctgtggcagggcaggggcggcttggaacctgcgccatgtgatctgggggctgtgtcagggcagcgggagtcctcgtgtcccctgcgcacaacacagacagaaggctgggtccacccagtgggcggtcgggtgccaggccagtgcttaccccgccatgttttcaagcccgaggccagctggctgcaggtgcagggctatgcgtcaggggtcagggtgcacacatccctgcaggtctcggggctcctgggttgcttctggaagggcccggatggggcctgactggagctgccgaggggtggagcttctgggaaaaggatccctcctagggggagtgtcttgggcctggggccacgtggcacggagagagacgggtccatggcagtgtctgcttttctctgtgaaggcaaagggcctctgagggagtattacagccgcctcatccaccagaagcatttccagcacatccaggtctgcaccccctggctggagggccgaggactacccccgcttctaggtgagaggccagcaggaggctcagggaggacgcggggccttaagcagggggaacaggggtgggcaggatgtacttttttcagaaaaggtggctctggaggccacttggggacaggacctgggctctagctgaactccc

SEQ ID NO: 245 - DNA, 362 bp, Homo sapiens
gaggaaggctcatccttctgtgtgtgatcacagaggctggaataatcctgcgggtgaattgcaaattgctaagtatatttggtgagtgcaaaccgcaggaaactgacgacccggtttttctgaggggtggtgcggcagcaagacagtaggagaaacagcacagcaacctagcatcctccactcagccgcgcaggtggacttgggccagatggcccccaggggcgtgtcatgtgccttctctgacgtttgtacgaggcaggggcagcaacggcagccgggcatgcaccaacggtgcctctgccccggcagcgatgactctacagcccatgatttccgcagcccacgattggctggggcacagc

SEQ ID NO: 246 - DNA, 42 bp, Homo sapiens
gccccggggggtgcggcgggggcggggggggggcgcgggggc

SEQ ID NO: 247 - DNA, 1213 bp, Homo sapiens
gggaactgagagccagcccctcccacctctggctcttaggactcacattgcaagtgggggaggcatcctccgcgaggcgcggactgagagccagcccctcttccccccctggctctagggacccccatcgcagggggtggaggcaccccacgcgattcggggactgagagccagcccctctccttccccctgctcttcggacccccatcgcagggcggggaggcacccaccgcgaggcggggactgagagccagcccctctaccccccgtggctcttaggagccccatcgcagggtgggaggccacccggcgaggcgaggattgagagccagcccgtcttccccccttggctcttaggagccccatcgcgggtggggaaggcaccccccgcgaggcagggactgagagccagcctctcttcctcccgtggctcttaggacccccatcgcagtggggggaggcaccccccgcgaggcggggactgagagcaagcccatttcccccccccccggctcttaggacacccaacgcagaggggggaggcaccccctgcgaggcaggaactgagagccagacccacttctccccggctcttgggatccccatcgcggggaggggaggcaccccacacgaggcggggactgagagccagcccctcttccccccctggctattaggacccccatcgcaggggggagaggcaccccccgagaggcagggacggagagcctgcacctcttcccccacgggctcttaggacccccatcgcaggcgcttcgcaccccacgcgaggcgggtactgagagccagctcctctttcccccgtctcttaggactgccatcgcagagggggaggtaacccccgccaggcagggactgacagccagcccctcttcacctctggctcttaggcccccatcgcagagtggggaggcaccacatgcgaggcggggactgcgagccagccccacttcccccctggctcttgggaccaccatcgcagtggggggaggtacaccccgcgaggcggggacggagagtcagcccctcttcccccactggctcttgggaaccccatcgcaagggggagaggcaccctccgcgacgcggggactgagagacagcccctcttccccccctggctctagggacccccatcgcagggggtggaggcaccccacgcgatgcggggactgagagccagcccctctcc

SEQ ID NO: 248 - DNA, 415 bp, Homo sapiens
gcgaggcggggactagagccagcccctcttcccaccctggcttaggacccccatcgcggatcctaagatccttaggacccaactggaggactgtgggtattaggtgcccaagaagaaagctcagatctgccgacgttacttgggatttactatccgacaggtgtccgaacacagctcgagatcagaaagaaagcaggtcatttgcaatctaccggagccagcccctcttcccccgcttgctcttaggacccccatcgcagcagggcagacacacaccccaaggcgggaactgagagccagccccacttcccccctggctcttgggacccccatcgctgtgtggggaggctccccccgcgaagcggggactgagagcctgcccctcttccccccccaggctcttcggacccccatc

SEQ ID NO: 249 - DNA, 189 bp, Homo sapiens
gcctgtggtgtggcaggaaaacagaaatggcacggcagaggtccccacccacgggcaaaagtgtctcccctccatgcaagcacggggcccaggggaacctgggtctcctagtttcgtgcccacggagcactttgggccagtggtggccagcccaagacggcagggaggcttgaaaggggaggttgaggc

SEQ ID NO: 250 - DNA, 65 bp, Homo sapiens
gcatgcgcggagtcctgggttcgcacccccggagcggctgagcccagcgggttgccgtccaaagc

SEQ ID NO: 251 - DNA, 71 bp, Homo sapiens
gcggtgccgcccaaagcggcagggatgcttgaaaggggaggtcgaggcaccggtggaaggaaaaaaaaacc

SEQ ID NO: 252 - DNA, 53 bp, Homo sapiens
gaatgcgggacccctgtgtcccagggaccccgcgcatgcgtggaagcgatggc

SEQ ID NO: 253 - DNA, 68 bp, Homo sapiens
gtgggcccgaggtgctccatggttgcgaatttttgaggcccacagtccgctgggccccacgtatgcgc

SEQ ID NO: 254 - DNA, 104 bp, Homo sapiens
gactttggctggcccctgtgagcccgaggcgctccgtgggcgcgaacctgggaggcccagtgtaccctggaccccgcgcatatgcagtggggaggcactttcac

SEQ ID NO: 255 - DNA, 29 bp, Homo sapiens
gcatgcgcggtggagtggcactttcgccc

SEQ ID NO: 256 - DNA, 188 bp, Homo sapiens
gctgattcgcggggcccagggtatcctgcatctccctgcttcatgttcaaggagagtctcaggctcacacggggcagatcaaagcggaagtaaggcttgaaaggggaagtcgagtcacctgtgtggtatggaaggaataaaaacggtgcagcagaggtccccccatgggcgaaagtgccttccaaccc

SEQ ID NO: 257 - DNA, 400 bp, Homo sapiens
gtgtcctttctgtttgttatttttccttttaacagaaaggaccctcagctgcaggtctgttggaatacctggccgtgtgaggtgtcagtctgtgcctgctggtgggtgcctcccagttaggctgctttgggatcaggggtcagggacccacttgaggaggcagtctgcccgttctcagatctccagctgcctgctgggagaaccactgctctcttcaaagctgtcagacacggacatttaagtccacagaggttactgctgtctttttgtttgtctgtgccctgcccccagaggtggagtctacagaggcaggcaggcctccttgatctgtggtgggcttcacccagttcgagctttctggcagctttgtttacctaagcaatcctgggcaatggtggac

SEQ ID NO: 258 - DNA, 471 bp, Homo sapiens
gtgcccagggaggggatggaagctctgtgccccttcccccatacctcgtgctaggcctctcttcatctatatcctttggaatatccttataatcaaacagtaaatgtgtttccctgaggtttgtgagccattttattctagcaaattaatcaaacccaaagagggggtcgtaggaaccccaaattaaacccatcagtcagaagttccagaggctgggacttgtgattggtgtctgaaaggggggcagttttgggggctgagcactcgatctgtggggtgacactatcttatggtagatagtgtcagaatcgaattggtggacacccagctggtgtctgctgcagaactgattccttgcttgctgatagggagaaatctcctcatattttgaggccacagaagtcttctggttggattgttgtggttttggtgtgaagcagaggaagaacacaggttgagctttttccaaac

SEQ ID NO: 259 - DNA, 70 bp, Homo sapiens
ggccagacctcccttcgtgccacttcgactttcaataacagtggccgctaggtgacgcccgaagacaacc

SEQ ID NO: 260 - DNA, 87 bp, Homo sapiens
gccacactctatgtggctgtcactgtgccctacagcgtgtgtgtgagcacagcacgggagcccagtgccgcccgcggcccgcccagc

SEQ ID NO: 261 - DNA, 109 bp, Homo sapiens
gttgcttcctggggagggatagtccacctggaggcattcggagacccagtgattgtgctccgcggagcctgggctgtgccccgcgttgactgcctcatagataccctac

SEQ ID NO: 262 - DNA, 812 bp, Homo sapiens
gtcacccctgtgtactctgtggggaagggagggggcagcagtggcgtctgggctctgccaaggccagaataacagctgatacatcagatatgtcccagatgctttgcaggaattagctcctcaatcctgacaaccaccacttgaggtggacactttaattctcatcactccaaatgacagaggaggaggctcagggggctggagtgtctagtctaaggccacacgattatgatggatgggaacctggacagttggggtgaggagctctttaatctgagcctctaagttttaggacccctagaaagggtagcgggttagagaaggaagctgccttcttactgtctggggtgcagtttagggcagccccgccacctaattctctcggagccgaacgcttttttctcccaagtgcctgtgcatgacttaaatctatttcttgcttccttcctttggcctcagtcagctcctgagagttgacaggtcttggttaattgccaagtccctggctcctaggctggctttgcagggcttgcctcttgggccccacaccagggggctttgctttcggatgtcttcacctccctggagcaatggaaggcatgctagcctggggctctgggctgggggaggtatgtggggcttgcctgttgcttcctttctggccggacagtcttccttgggtgcagtcagtagagatgtctttgactgtcactgctgtggctgccaaacaggaacagccacaaaaaagccccaaataaacaaaactccacaaacagcccagccctacctcctccctctcccctcctcacccc

SEQ ID NO: 263 - DNA, 186 bp, Homo sapiens
ggtggtgatgcatggggggctgggtccgcacacgcccccggagcggtagccgaagctgcgtccgcaggagccggcgcggaagcccccgcacacgctgtggctgccaaagcccccggtgaggccgcggtagcaggagatgccgcggtagggggcggcggtgatgcagcagcggcttggccggggccc

SEQ ID NO: 264 - DNA, 715 bp, Homo sapiens
ggtggggccctcccaaacattgctccgtcagaggtgagggagggtaggggtgatgtgatacgtttctccaggttgcagagcaggtctgtgagtttgccttggtgtaatcacgtgcctgaaggtgataacaagggtgtgcatgtgtgagtgagctgaaggggggcagagaagtgtgcctgtgccaggcttgtgtacaccgggcccagatgcctgcacaggtgccagtgtgtgtgtgtggagggggatagaggtgcctgcaaatctgaacatgtctctccatatgtgaccctcagtgtatgtgagagtgtgtgtacccgctgaattatgataaaattacaccgacccttacagaaaatccataacagcctcggcctttctcccccgacctctcgacctctggggtgcctgaggaaagggttgacctggtcactgcctcctcctagtcaatgagtccccctccattagcataaaacatgaatctgctggcagcttgacaaattataactagcagccagagttttgccaactggctggcttgggtgctgtctatttatcattgaaaatggtaaatcataagaatccagatgacttaattattcaaatccacccaggacccagagaagctgcaggcccgtcaatctcagccctgggctcacagagaagagtgggggaaatgctgtgagcttgtgagctggaagaagcaggttccattgcc

SEQ ID NO: 265 - DNA, 58 bp, Homo sapiens
gatcctcccgcctcagcctcccgagtactgggactacaggcgtgtgccaccaaggggc

SEQ ID NO: 266 - DNA, 145 bp, Homo sapiens
gcagccgctggcccgggtgctaagcccctcattgcccggggccggcagggccggccggctgctccgagtgcggggccgcgaagcccccgcccacccggaactccagctggcccgcaagcgctgcgcgcagccccagttctagctc

SEQ ID NO: 267 - DNA, 82 bp, Homo sapiens
gcccacggagtctcgctgattgctagcacagcagtctcagatcaaactgcaaggcggcagcgaggctgggggaggggcgccc

SEQ ID NO: 268 - DNA, 334 bp, Homo sapiens
gacagcatgctggctgcccttgcagccctcgctgactcttggtgcctccttggcctcggagcccactctggccgcgcttaaggagcccttcagcccgcttaaggagcccttcagcccgccgctggaccgagagagccctcctctgggctggctgaggccggagcccgctccctcggcttggggggaggcgtggagggagaggcactggcgggaaccggggctgcgcatggcgcttgcgggccacctggagttccgggtgggcgtgggcttggcagcccgcactcggagcggctggccggccctcccggcctgggcagtgaggggcttagcaccc

SEQ ID NO: 269 - DNA, 308 bp, Homo sapiens
gaccccatggcagggtctaggggtgaatgtttacagctgaaaccccagtgggcgtgtgttacagtatgctcttttagtttagccatccgtagggggcttgtgttagctcagttagaccccctgccttatcgcaaggacagagggctttctgtatcccggggtttcttgccttggagtaccagaactggatcacacgtgggcttggagagcacgatttattgagtggagataactctcagcagaggggggagccagagggaaatggagtgggaagatggttttcccctggagtcgggccactcagcagc

SEQ ID NO: 270 - DNA, 567 bp, Homo sapiens
gagctgctggaattaactaaaactcactctttcccaataaatctcccctgagccgacacacagcagctgcgaattcccagcatgggcctggacaaaatgctaagaaaaactggctgtgttcctgaatcttgctcgtcattggtccccaagaatcctggacattgacacccagatattccaaaacgatttgtgcttttccaagctcggctctttacttaacctgccttgaagatttggcactataatttcccagaagtgcaggctgggcttgttttgagaaaaggtgaaatggacaagagacagagttcagaaaatagtgattaaatacaaacagcaccagctattaagcaagagtcaaggccaggaaatgcaaataaaattgccgagggttgtttagacagtggccactcagaaggagaggtaatatttggttgtaaagtgaggccacagacatcttttctgatttaatgaatttgtgatagtttacttcttttcccagctttcatttcatttgtggggcgatggctgggggatgtaggggatatggaaagttgagcacaagtgcac

SEQ ID NO: 271 - DNA, 312 bp, Homo sapiens
gggacatgcggtgcatcagccggagctgatgtgttttgtaatttatagtcacagggcgcctgtcttcatttagcagtaggcctgctggcagcttccctgccagggaggaagcaagttccacagaggcccacagcccccgccagctgccggcccgtggtatttggggacggctgttgctcagagacacctgggaataggccggggccgagatggcgctgagcactcggtctccccttcagacccatccatcagcagcggtccctgccagaagatggcctattgaacatttccagaaatagcacagccaagccc

SEQ ID NO: 272 - DNA, 663 bp, Homo sapiens
ggaggctttggggagatgttgagccagttatttctgggacgaatatttttttgtttcccactgtctttgctttagccacaacagctgctagatggaggcaccaggactctcacccagttccctggtcttggtcttcaaaggccaactcctgccccaccacagtctcactggatcagaagctccggaagtggagcccagtaatccatgattttcacaagtccctgggatagtagagagagcaccacactaggggtcttggttagaagcagcaggtctgggctctggaaccatctcagccccggtcagctgtgtgtccctgggcatggctttttccatctgggcatctgttttcaatccaccaaatgacaggcgtgtgtgggcgttgcctttaaatccctttccagctctttctactggatcttgtgattcttaactctgagctttcaagggctgctcttgggcattagaggggtgagatgttcagaaaatctgggctgcgagcccaaacagcctccttgagcaaagcattctgggtcaagacttcacagtgctgattcaagagcgtctcgagcactctgagtggtgagggggcggctcggctcgccaggaggaagtggcatccagccagtcggcgatactttcactttcagtggaataattccc

SEQ ID NO: 273 - DNA, 580 bp, Homo sapiens
gacagagatggaaacttcgcaggaaatgttccccaggcgggagggctaagaggacacagtaactcttgagagttgctccgacagaccttttattttggcaagggcttgtgctttctttgccaagccatcattcgttacttggctagaggagggaccacagggaggggagaggggacatatacagctggctgtcagaacagtcgacctctaaatgggataacctcagagccaggcataagcaatctggaaacaaggaggggaggtgatggaaggtgggagcagaggcaggtgctggagacattgctgcagacttcctggaaggggttgccaagccgggaagattcagaggggaagagcacagctggggagagagcccctgctggctccaggtgctggtcccagaaggcatctttggagggaagggtctgagctgtgacggttcagtgcagggacaggtggggtaagctcaggtgtgccgggctccctgtgcgtgttgcagagctcccggggagggcaaggatgtgaagtgcgagcagatggtctccgtcactgccaacctaaatcaatgactggagagggc

SEQ ID NO: 274 - DNA, 81 bp, Homo sapiens
ggatgccccccgggataactgtgcctagaatctgtgggtccaatggagggaagaaagcccccgaaaggcgctcaccttttc

SEQ ID NO: 275 - DNA, 623 bp, Homo sapiens
ggaccctgtagtggattgaaccaaggagtgccctggagtaggtcatcattttctgggcggctagttaatgataagctttcagctgggaaggagccagaaggaaagaggcttcctcagggggcaggagcacgcaggcctccaagccccacacctgctgtgtcatgtcagaggtgccagagcaccctttgactgcctgaagaggtctcggcttgccacccaccagggtcaggtcgtctcaggtccccggggaggtttgactagccaagagccccaggcagaggcaccaggagaggagagcagcattggcagggcctgccctctcccagagcaaacagggacaaaggttggtgtactcacggctgcctctcccatcctgcctgtgcctgcccgccacaccagatactccaggttgtcccagcattgctacattaggcaggaatctgtcatctctgcctgctgggtcactcattaccccagatccaattcccaggcagggaagtttggggcatcagagcagcggagaaggctttggcattcaggagctttaaaacagaaaagctgtcgtgtctgtacctgttcagtagggagccaaacgtgtttattgcatgtgttatgatgctatc

SEQ ID NO: 276 - DNA, 115 bp, Homo sapiens
gggcgcctgtaatcccagctactcgggaggctgaggcaggagctgaggcttgaacccgggcggcattgcagtgagccgagatcgcggcattgcactccagcctgggcgacagagc

SEQ ID NO: 277 - DNA, 91 bp, Homo sapiens
gaggcaacatgggcggccccgtgtccccaggccataccacgtcgctgacgccataccgatcctggcaagaaaggtgaccttgtaccagccc

SEQ ID NO: 278 - DNA, 132 bp, Homo sapiens
gactcagccccagggacagcatgtggaagcgagagacagggagagagacaaggcgtccccgagtcgctgagtcccagccggagagtgaggaggcgccctcgggccccgccgccccacccggcccccgcggcc

SEQ ID NO: 279 - DNA, 367 bp, Homo sapiens
gtaaagggtctgtgctgaggaggattaatataagaggaaggcatgcctcttgcagttgagacaagaggaaggcatctgtctcctgcccctccctgggcaatggaatgtctcggtataaaacccgattgtacgttccatctactgagatagggaaaaaccgccttagggctggaggtgggacctgcgggcagcaatactgctttgtaaagcattgagatgtttatgtgtatgcatatctaaaagcacagcacttaatcctttaccttgtctatgatgcatagacctttgttcacgtgtttgtctgctgaccctctccccacaattgtcttgtgaccctgacacatccccctctcggagaaacacccac

SEQ ID NO: 280 - DNA, 373 bp, Homo sapiens
gtcagatggatcattctgtattgataaaatcactttgccccaaataattcagccttgatagatgcagaagacataggctgaaacccacttgaaaatctgatcttcatccctctctctctctccctccacccagcacatgtctgagtccttagctctgacagtgaactttatattttttcacaagtctttaactcaaagatttttttctctctctctctttccaaggaacttctattcagaaaccattccaggcacttggaattcggaatctaaatatccctgacgcagccccaggccctaactgccccccgcccctccccggccgcctgccacggccgtcatatcttattttttcttaccatctgtcctcacc

SEQ ID NO: 281 - DNA, 359 bp, Homo sapiens
gcctggggggcccgcccgtcccaccagcccttcccgggaggccctggctgccagggcctactctgacgcatctcgtccgcgtcctccagcgtccgcccggccctgcgcagtcgtggccggcagagggaggggtggcgggctgccggccaggacgaggtcagcaggctggccagagtccagcctcgttcactgagagggcaaagcaggccccaagggcgggggcctgggcctagtcgcacagggcgggacaaaccaggtgtcctgactcccagccgaggactcctgcacccgggggctgtgtgctggacactgggcaaggggtggacgtacgccaggcccagctcggggagggaggacac

SEQ ID NO: 282 - DNA, 169 bp, Homo sapiens
gggagcatggtgggggcggggatgtgggtcaaggcctgctccaccccaggggtgctgggtggagtccctggccccaggcccaggcgtcccggcgacgtgccacagccccacagccttcgcagggagagcagcggctggctgctagtgaggctggactgtgggctcccac

SEQ ID NO: 283 - DNA, 203 bp, Homo sapiens
gttaagaggcacggaggttgagggaagggccacctggaggaaatcccatttggcaactcatttgggttcttgagggcggatgaaacagtccccaaagttcagagagaacgggcttctaggagagggtctgcagggacgaggcaaacagaggctttgggatggctcaagaaaggaacaaggacatcccgtgtggaacagcagac

SEQ ID NO: 284 - DNA, 376 bp, Homo sapiens
gttttgtttctgtgaaagtcttgctccaattcgaggtgcaggctgccacgtcccagcctccagtcctatgcaaaccggccttgacttctgtgtgggcgtctggaaacagtaacgagggctcaccttcttggaatgtggagattttgacaaagatcagcagcgatggctcctccagagtaattggaggttttgccgagattcggtaccaactctaggcagcagatgggaggctctttctttccttcttgctcagaagcctggtttgcaaggtaacgctgccttctgccttgaaggcgaggaacaggggaaaagtgttcctgtgggccccagaggtggtgctgggcttcctgggtttcttgtgctgcattgaggaggc

SEQ ID NO: 285 - DNA, 94 bp, Homo sapiens
ggtgttcatccgcccgggaaaagagcgcctgttgctcgctgcccgcgtgtccctggctctctcgggaacccagcgccgaaggcgaggtgggcgc

SEQ ID NO: 286 - DNA, 350 bp, Homo sapiens
gtttagcactcgggcctccgcaccagcaggagcgaggccgtgtcttccaactccctcgacaggcgtgaggggcacctgccagcgccgtcgggggcctggggcaccagatggctgcagggccggaggaggaaggggtgtggactggaaaaggtgtcgaggcgggaaggggacgctctgctgggaggaagaggccgctacgagcccagaaggcagcggggagagaacagcgcaaggcacaggcggctgtttgcaccaactcatttgccggcgtatacctcgcgctcgctgggaagcatttgcacaggctgcaaagcgcagcgattagagacccgcttccaaataaaatcacc

SEQ ID NO: 287 - DNA, 150 bp, Homo sapiens
gcttgagctcagcagttcgagatctgcctgggcaacatagtgggccggtctcttaaaaaaaaaaaaaaaaaaaggccgggcgcgtggctcacgcttgtaatcccagcactttgggaggccgaggaaggcggatcacgaggtcaggatatc

SEQ ID NO: 288 - DNA, 284 bp, Homo sapiens
gaagggctctgctcccgccccccaacccccactggctcccctgcaccctctgctcgggggcagcagagccggcttagaggcacctggcttcagccccagggctttggggtaagaacacaatgagactgggtaattctcacagaaacttacttctcacagtgctgggggctgaaagtccaaggccaaggcacccgcatttggtgagggctgctctctacccaagacggtgcctggcgtgcagtgtcccctggagggagaaatgcgggtcctcaggaggcaatggc

SEQ ID NO: 289 - DNA, 69 bp, Homo sapiens
gggatccttgtctgggcactgaggacgatgagctccgcctctgttctcgcgtcagggctcggctcctcc

SEQ ID NO: 290 - DNA, 106 bp, Homo sapiens
gagctcacatcactgaaggagaagccaaagctgaggaaacgtgcaggggacgggcctcgaagcggccgcggaaggaggacgggaacccggggccacagcatctccc

SEQ ID NO: 291 - DNA, 558 bp, Homo sapiens
gtcttcacataaaaacgacgcagtagctttctgagaaacttctttgtgatgtgtccattcatcgcacagagtgaaacctgtcttttgattgaggagtttggaaaatgtcttttcttagaatctgcaaaggcatatttgtgagccctttatggcctttgttgaaatatgaaatatcttcacataaaaagtagacagaagatttctgagaaatctctttgtgatgtgtgaattcatgtcacagaattcaaccttcctttcagttgagcagtttggaaccagtcttttgtagaagctgcagagggaaatttcttagctgcttgaggcctatggtgaaccagaaatagcctcacataaaaagtagacagaagatttctgagaaacttctttgtgatgtgtgctttcatctcacagtgttgaacctttctttgattgagcagtttggaaagtcttttttgtagaatctgcaaatggatatttggagctatttcaggcccatggtgaaaaagaaagtatcttcacataaaaactagacagaatcattccaagaaattttctgcg

SEQ ID NO: 292 - DNA, 2552 bp, Homo sapiens
gaatttctaaggttctatgagcacagctacaggagggattaggccagcaatagggtcgctggtggcagtagaggcctaaacctgcatggcttacacctctgtctgcaacgtaactgactcattctagccctatctgtgcactctgcagtacctctgctcagaaggtgccaatgggggaaaatgctagatagataatttggcttgagcatagagtgtgagggaaggacacatactgaaaacaggaaggagaatgagaaacctgaatcaagaaccagcctaacaaatattaggcctttgaattataaagcaggcatatggtatggctttaggaaattacaagatcataaagatgagcaaataagactagaaaattatgactttgggaccttgtgtctgaagtaaatggagaggcactttggggagtggcaggcaatgaaaacatatctaccacctgaggagatgactcacagaaattcaaaacagcctcttttttttaagtccaatgcaaatatagtcaagtgagggagggtacatcattcattctcaactcactgtgtttagtttcttaaaagatggccgaattgtaaaaaaagtttttgaatggggcagttctagtgtcagttgttctctcttttccttttttacttacccactactataaactaccatagatacattctttacattcagttagttagttttacgtttcccaatttccacatttgtaattatagcctaggaagcttctttgcttggagaaagatgttcttatattaaaacataaaactcttcccaagcatccactagttcatccagtaagcaatttcatcattacacaccagaggtcagtattggattattaatttacatgagtgattaatttttactttcccagtaataaagatgagaaacaaaataccaaagattattactatattagagctttggtgttagttccttaagcaagtatcatcagtgcaggcatgcacagatcatgaatggcttaacaaaaatacaaaagaaaaagaaaaaagccatcacaatgaaggtggcctttgttctttaggaagacattcataactcattccaggcatattaattatgcaacttttacacaaaagttactttatattgagaaatgttcacaactagcagtattaacagacatgctggcagtgaattaaaaagataacaatagtttttaaagcctcattcaaatctgcatatctacaatagtgtatcaatttgggatggccaaagttatagataatttggataaataaaataagggctcagcagtaaaataatgactatctccagaagctttaagattaaatgaaaagaagaaaagactaaaggcagatcaagctatcatgctgactacagacatagtaaaggctttccacagaaagagaaaatagattagtcttgttttactctggtcaacaaaggatagaattatagaaatggagattgcagctgcatatagatagaattgttaagactcatagctattccaacatctttgcttagggggccatagggagtgccaacatcgagtatcagaacaaactagatgaatgccaaaatctcttatattctaaggttatatgagaaagtgattttgatgccaaagagtaagtattccacaaattccaaacctccttccaggcatatatattcgggtggcacctgctttaagaagtctcccttaatctgagaacacagtttgcttgtgcttctaatactttgaccatatattgtcttttgtcatcttttgaccatattgtacatttatgtattatttagctttgtgttgttatgtcttatctaaaaccaagattcttcttttaggaatacatgttattttatcctctatgacacctagcacaatacaatgaagttagtagatactcagataatatctgtagtctgaacctatttccttatctaaaaagtaaggaataaaagcacccactttacctgcctcactgagctgttttgaagatcagatgaaataatgtgcctgaaagcactttgaaaagtataaaatgttatacaaatgtaaggcattctaatttcagagggaggtttttctcagttataacctccatgtcagcttgaataaaggaacattttttaaaacttaatctgaaaagaaacttgtcccttctgggcacaaattataaaactccccaaaaaatgtttgtatatatttttgtttgtttgttcctaaatagtataacaagctatggtctttcagggaaaatgttgctctgatactagttcacaatgtagaaaattgcccttatgtactttcaggaaagaattgcaaacaagtgagctattttctcttctcgagtaaagggacttcccaagcatgggtggcagctgttcaagtccatctggtcaagaattcactaagatcataatgtgaaagttgctcaagtgcagatttgcatgacagcctgcaaatgttcctttggagacgaaatggtttctcaggtcaataatctgcatatttaaaagtctctaggacaccctaagatggc

SEQ ID NO: 293 - DNA, 87 bp, Homo sapiens
gcgctggggccgcctctccttccgcaggggcagcggggtctcctggaagccccggagcctcatggaagcccgggagggcggcggagc

SEQ ID NO: 294 - DNA, 55 bp, Homo sapiens
gccaccatcgcggtggtgaggacggaggcggctctggagcttacccctggagtgc

SEQ ID NO: 295 - DNA, 100 bp, Homo sapiens
gaacagcgtcttgaagatgatgttgaagacgtaggtccgcagcagcgccccggccatgcgcaccctgccgcggtcgtcccgcgacgagggattgtcctgc

SEQ ID NO: 296 - DNA, 239 bp, Homo sapiens
gccccgagtgactgcatttggaggtcgggattttaggaagtaacgaggtcttagggtggggtcctcattcgaaaggattggtggcctgagcgcgcgcggacacacacaccgacaggccctgtgaggacgcggcgaggaagaggccgcctgcaagccgagagcagcccggccggcccctgacgctggctcgcagccccatggcgtgagaagcagttctctgcgggctgagcctcccgggc

SEQ ID NO: 297 - DNA, 196 bp, Homo sapiens
gacagccaggtgcctcaggtccgtgtgctggcttggacaccgccctgcgtctgcagagagcgcggcggtgaagcgggagcaggcggcctggcccaggagccaggacggccacagccacgccaccaccggcgagggcgagggccagggccactcactgtgacccgcgactcccttttagagagccactttgcgtttc

SEQ ID NO: 298 - DNA, 96 bp, Homo sapiens
gctttgcagacagcaagcccatacatccaatatttaccaccaataccagggcagatgacttcggtgtgagacgtgaggtgagttcgaaaaggccac

SEQ ID NO: 299 - DNA, 623 bp, Homo sapiens
gcacacttgctgtaatgtaaggaagctaacaattcagaggccactgcagtgaggaaggccaggccgcttggagaggtcaaatgttctccagccatcaccccagcacgtcccagccgacagccagtgacaaggccccagcatcacagaatggagacaaggacacatgagcataataaaatcagtgctttatgtcacaaagttttgaaacagtttgttacatggcaatagccagaaaacacagccctgcactctgattgacacaggactcacccactgttctcctgtccccgtgacttctccactgccctgaaatgccataagaaatttatcccgagcctgaataaaatggaatcaaacattttcctacaggctatttttttttcaataacttcctccccagataacccaaggattcaaaatggttttcagagcctcaccattgtcttcacttgacaggaaatatgtagacagcctttgttcccatggaaagtgtgaagaacatgaatctgacaaaccacacaggaggtaatttcctcttggcagagttttccacaggtgctgaatttctttaatttatttatttttgtggagagggaggtggaagaggatgggcataaaaagac

SEQ ID NO: 300 - DNA, 138 bp, Homo sapiens
gaggggggagcgcctgaaggtgagatatttccagtagaggcctatgtacagatggcaagagggactaaatattctggacctgttgcatatgggcgctcccgctgatgcaaaacggcgttctgaacagggaaggcatgc

SEQ ID NO: 301 - DNA, 322 bp, Homo sapiens
gcagtttacttccccgtagggagagaaactcaggcatccaggtgttagactgtgggggtcctgcaccttcttccttcaacccctgggcgcacagcttgaagccctcctgggccggacgacgtgggaaatgactgcaccccggaggccaggagctcgcgctcacctcccaatgacttcaaaatgtgtggctgcatcttgaggaagagcagatcctgcctggtgtccgctatcggcgcggtggctgacaccgaggcaggcggcgctctccctggccatgatgaagccgccctgtgacccccacagcccgcacttctgagcagcc

SEQ ID NO: 302 - DNA, 721 bp, Homo sapiens
gcggctccaagggtgcccggccccatccaaggccccgtcccatgggttgcggggaagccgggcctggggacccccctctcaccctgggctgaccccagctacctgtgctgcttgtcccgggcctccaggtctccggctcctgcgctccaggccgcgctccacctccggtccttgacagccgcccttggattttccgctgttccgcgtcccggattcggtacccggaaccgtgcagacgtggtctatggagcccgggccatctcgcccccgcggctcccgaagccgaagaacttcttggtggtggtgacttctcagacccccaaccaccggctcctgagcaggggctgctctctgtcaccttttcactgccccccaccgccgacccggccccaaatccaggatccaaccccaaatccccgatccaatcctcaaatcccctatccagcccccacatccctgatccaaccccaaatccccaatccaatccccaatccgcgatcccaaatctgcgatctaacctagaatccgcgatccagcccggtccaccacagccttcagcagcgacactcagtctctgacctctccgacagagtgagcctcgaaagcccttgagtgcgcgcctgcaccgcggtggccgtccggctcccggaagcctcagaggacaggacatgcccaggtgggaactgggctccacagcacagctcagctgtggctgcaaacc

SEQ ID NO: 303 - DNA, 81 bp, Homo sapiens
gggaagcaccgtgtgtcagctgaggtgagggctgagggacgagggggaatccacaaagacccctgcagcttaggttcgcgc

SEQ ID NO: 304 - DNA, 176 bp, Homo sapiens
ggcttgtaccgccaccttgggcgcctctgctcctggctgcgacgtggggcgtcctagccttcggaccgggaacctgataggagacgaatagaaagggggaaagccctggaaaattaagccggcacaagaagggggaaacgtttggaggtcaggcaaggctgatggccttggggatc

SEQ ID NO: 305 - DNA, 146 bp, Homo sapiens
gccatttctgggcgctctggctgttggctcagggtcgctgcttggcgtggagtccggaagagaagagtcgggcactggcagagaccgtccagggagccgcggagcccgctcagggctaaagcggccgcatctgccgtctcagaaac

SEQ ID NO: 306 - DNA, 306 bp, Homo sapiens
gagcgcagcgcgcacgggttccggtgggtgaagtcgctcgagggcagggtgtggtcagcctgggctccagagtccctttcagcttcctggctaggggtcaggaagccccggctcccgcagcccatgtgaaagctccccccagcacctccggcctcggtgcccgctgtggcactgctgggcagctgaataaaagcacttctggcagcatgctcggcccctcgtgagcgctggtctttctgaatgtaaacatttctcctgctcgctgagagccccttggcggagacactgccactggtgctcctgggc

SEQ ID NO: 307 - DNA, 3523 bp, Homo sapiens
gagagcagcagggccctctgcctgaacttctgaactgctcagactccttggccttttccgccaaaaacttactaatctacagttcgatgctctcgtcactgtccactgaactcctgtcgtcagacagggagccggggctgggagctgggccctggcattccctggggaaatggattcccttcagaggcggaggcagaggcgcatcccctcactcggaaggccggggccgtgtcctggctcctgacgccctcctgcttcgtcttctctgccatactgccacagacactgggaggtttgttccctggaccctcgccgctgtctctcttggacttggagagtcagctattaagcaccggcgggcttctgtctttccagtctctcgggagcccgcccagctgctccaggaagtgcatctgggcagtgctgaacctgaccttcctgcacgcagccctgggttccctgcacctcttcttgagctttcgcttggaccttaagtccttgatggccgtgtccaggtcctcgtcactgtccagggagctgctcttgtcttcggagctctccttctcgtccaggtgcctcacctcgtctgtcttaccctggccctgcgtcatgcgagtgtcgccgggccccttggctgcgccctcccctcccgggacctcgctggctttgccctggacgggcaggtcccgcccctcatggccgggcacggctcacgcctggctgtggtcggcatcctggccaccatctttcaccacctcccgcgttttcttgggcgtggacggcctcatggcatggccgccgcctctacgtttccttttgcagctcagcagcgggtccggtgttttagagaggggggccttggggccactggtctggctgttggggccaggcggtgaaagtgggccctgggcagcctgcgagcagctctcacctctggccagcaaactccccgactatgccttgagggtcaaaacgtctggatttcctgatcgatgctgtcgtcgctgtccacggagctactgtcgccgtcagagcgggaaggcacgttcagggagtagaagcgtgggcttgcagaaagggacctgttgctgccttacatgggggccggcagggtagtcttggaaatgcccaagattgcttccgcgcgcgtcagttcagcggacgtgtctgcctggcacgaggaccgttctacaaactcgttcctggaagccgggctcgctggaggcggagctttggtttccttcgggagcttgtggggaatggtcagcgtctaggcaccccgggcaagggtctgtggccttggtggccactggcttcctctagctgggtgttttcctgtgggtctcgcgcaaggcacttttttgtggcgctgcttgtgctgtgtgcggggtcaggcgtcctctctcctcccggcgctgggccctctggggcaggtccccgttggcctccttgcgtgtttgccgcagctagtacacctggatggcctcctcagtgccgtcgttgctgctggagtctgacgcctcgggcgcctgcgccgcacttgtgacttgctttccccttctcagggcgccagcgctcctcttgaccccgcttttattctgtggtgcttctgaagggctgcagggggctgctggcttcgggctgcccttgttctcctgcttggtcgtgaccctggacttgaggcttctgggctgcacgttcgtctttgctaaccggggaggtttgcgaaaggcgaactctttatgggcgcccttcagaccctgccgatgcgccacctttgcggctagctcttcgtgggatttcaagagtgacttggtcgaattttcgtttgggtctggttttttatctattgaccccatcacatttttgggtcgcatgctatctcttctcattcagaagctgttctatttccgccttaatgctctgctcgaaggagtcgttgctgctcgctctgaccgggaaggcagaaccctagtcctcactggatctcacctggctgccagggccaccacctgagccaggtacaagttttggggggacacacggaagtcggggcactgccgtgagatagttctggcttacatctactgccactgcctgcagccctggaaggctgggctgcgcctggctggcccctgccagccccgggctgtgcggctccactctttgcctttaggtactcccggatggcttccgcaatgtcccggtccacggaatcatcattgaatctagcaccaacgggccaaagtctgcagtttcctcctccctcatggggtcaaagtcagcaacaagaccacaggcaggcaatgcgggctgctccttgtgcacggtgggcttggcagctggcttggcgtctgccctgtggcccctctgtgcagcgcgctcatcggtggtgccccgagcaaccccgctgcgctgcagcgtgctgatgagcatctgcacccgggcgctcaccgacacgctctccaccccctcgtcagcctccgagaagcacccggggaacctaaagctccctggtgggccaaaggcctcccatttggactggggagcaacccctggagtagcgttcctgagaaacattctagcagaaggggagggacgcgcagagggacgacgctttatttctctgccagcttcatatactcaaaaggttggcagcggggtgcagtggctcaagcccgtaatcacagcactttgagaggccgaggcgggcggatcgcgaggtcaggagtttgagacccgcctggccaacatactgaaaccccgtctctactaataatacaaaaattagccgggcgtggtggtgtgagcctgtagtcccagctactcgtgaggcagaggccagggaatcgcttgaagccggaaggtggaggttgcagtgagctgagatcgccccactgctctccagcctgggtgacagagcgagactccgtctcaaaaaagaaaaaaaaaaaaaagagtggcaagtggtgcccatgagataaagtctgcaaatgcttctttgcagtttaaaaaggacgacgactataaacccaggatcaggacgacgttacgcatagatttattcttgacctgaccaacgagctcttgaaattctctttgcaactaggtcgactgtgaaactgcagccagtgtccccaaacgccccaaggataaggcctttatcactccgacgcatcctctctctgctttttaaatagacttttgactcggccaggccccctgccacccaccgcgctgaccctgcctgcgcttgcgtcccgcgtcccgcatccggggggaggcggcgggcccgggtctctggggctggcccatttacttagttttgtttttgttgcatttgcttttggtgacactccctttttgatattccacatataaatgaggcaataattttctttctatgtctgcttatttcacttagcataatggtctccctgtccacctcggctcccgcgcggggaggaggggcaagggccctccgcccgggccccgcctccccgcgcgccgctgccaccgcccc

SEQ ID NO: 308 - DNA, 907 bp, Homo sapiens
gctcagtaacctgtgcagggggagcctctggtggggccatggtctcaaccaggatatccgggagactaagacgtctgctgagcactcccggtgtaccttgggaccaccacagaaagcaaaagagttggaactggttccaggccaaccggccaaccaacgctcccaaacccgaagggtcaggggttgtcacagagcccttttccggacagcctgacacctgtgtctttagtccggtggccgtgctaatcgcctttaagtggccaacaggtgcccggtttagcctccgaattctaaggaaggacaggacagaatagcaagtgaaagaggtccgatcatactcaccatgtgacgatctagatgcctttcctggagactcctggctggctcgccaaaatgtaacacgtaaggttcttgcctagccacaccaaagaattggtgtggcagctgaccgcagcgagtgatagacacaaggactgatagagagaaaaagcggtaggctttattgagcagagtgaaagtacaaagcttccacagcgtggaaggggtccctcccgaatgggtagccagagttagattatacaactgccttttaaactctttaaggtgggaaatacgtgcagcgggaagatgttaccagagcaagaaaaaaagacaaccatttgtgacatgtcttagatcttaaggaaaaccggaattgcaacttaggttttatttattttatgacctcgcagcggcatggcaaaggagacagcatcttacaggactttacaaagtatgttcacaaggaattgggattgggagtatagataaggtccactggtcacagaaaaatggccagttaacattctttttactttagtttcgggggagggggaaggggagagagggagagaggacacagagaaac

SEQ ID NO: 309 - DNA, 781 bp, Homo sapiens
gcagtgttaatactcactcccattctctcagtcataacagttcattcatgaaaatctttataatcattttattagccattcttgtcagaggtctagtaactttaatttaagagtctttgactgtggaaaaaaatggaagaataaaaatgcgaagggggcacttgtggtctgaacgtagaccatgcagttaagcacatcccccttctcctgctggagaacatccaaaagcaacaaggagaaagggaaacaaaaatgcaaacttcattttcagcagaagtagaagacagctaaacccccccagagcccaaaataggtgtaagggctgccaaaagcagtggagactaagcagaggagagcaagactcatgtgggaggaagcccagagaacatgccacagagtgaattccatagcagcaggcagagggccagcttctgagataggagagagcgagcaaaattcagctctgcgaagcgaggggcccagtctgttgttagatctagatcttcctttgcaatgcaggattggggcacttgtgttggccccagaagcaaccctggacctgagttgatttttagacaaagaagaaggaaatctaaataaggaatcacacacacaccagcatatatacaaggaagcacatggttcaggatagtctctgcactgtcttgcatctacctacacccagctggctggagagaagtagtagctacataaaccaatgtgcagaaatcctgctaacctgtaacacagctctggttcctcctttacatctgaaactccc

SEQ ID NO: 310 - DNA, 590 bp, Homo sapiens
ggcttcacaggtatggtccactccgggtcttagaatttgccacttgttaagagccccgtcagcccgaggtggaggggaagccgggaggaaaatggcagccaaggctgcatcgggcggcgaagagggcagtgtacccagggagcggggcgctggccaggccaggctgggaatggaatctgtccctagcagcgaggctggcactgaccccctcccagtcacagccactgaagcgtctgtgcccgaccgtggggccgacgcccaggagaacgctcctcaggccgtgctgctgcccccgctgcggggagcttgcccgcagcccggacgtggcggggccggagctggaggctgaggggaagctgctggagagggtgagggatccgcagcagccacccctctcaagagtctgaccttccccgccttttcctgcacctcctctgaaacacccccagctcctgaggagcgctaggagacgccgtttgcctcctcccgcagcccggcgggggcggcaaggtggggactccttggtgtggcagctgaccccgggctcggaggtgcaggtcacgctgcattgaggatgtgcttatcttgtc

SEQ ID NO: 311 - DNA, 188 bp, Homo sapiens
gaagtcatattacagggaaagagtggagttcacaagggacaagcagagcaagttttgaaatcaaagacaggcaacaggcgtcaaccccgtccacacgcacaataagaacccagcattgggtagacacagcaacactttgtacgagaccctcttaccggcacagggcccgggctctctgcttccacttc

SEQ ID NO: 312 - DNA, 579 bp, Homo sapiens
gagccttctgtctaatttggcagaaaaacacagaatgtaggacaacaaaagaagcctcctttttccataaaaattcttcctcccacccacccttcttccccaaaaaggggacttaatttttcagctgcacgcagtgatttggtgctcactcttgcatcgaaacagttgcggtctgaacaggcaggaaacagttttcttttaattgccgaaatcattcggaagtgcttcatgccctgcttctgtacagcagatgctgtgcattaattggcctgcgtagaagtgacccagggttccttgcagcgggcccaattttaggcagagggtttaaatagcttatttattattttgtataatctggcgtacattgtgtgctcctgcacgtgtcgtatttcatggtctgcagtttctaatgtcatgtgggtttcaaaacctgtgtttctctggtaatgtactagcagcaggtaagctcaaaataccatccatcaggagctaattttttatccagatactccaatgactgatgaacctgtcttttgtatgaatgtttagcacagtggaaagccatatgccactggcacc

SEQ ID NO: 313 - DNA, 364 bp, Homo sapiens
gctacattttttttcccttccaattcagaaagcaaagtgttaccatagtaacaggactatgttaaagatgtctattttgcatagcacataaaaagtaggtttcctgtttactcttcttgtttcccagaagggagggggtgcgggggaggacaggaggagggagccacagctaaatcgtcacctgaagcccccagtgtgacctgctggattctagagaacacttcagcccataaggcaagggaaaacccaacgcagaaataaacgccggaacatcttgtcattgttaaatatatgatgcagtcacatcggcttcctgctctgtggggctcgtacttcctagtctacggttccgtgagatgccttc

SEQ ID NO: 314 - DNA, 392 bp, Homo sapiens
gagggctcagacaaaagacagagcggccgactgggctcagcggacacacagcgcagagccagctgctggctgggaggacgccctgcagcctcgcagggaacgtgggctccggcttccagagggcagcgccattcgctcacagacggccaggagaccctccctgtgcaggcaatgccgggtgaggcatcgctcctgaagaattaatcagaaactcagaaaaattccgccgagcagaagccagatgagaatccgactggaaatctagaaggaatctgaccagcatcgcaaagaaggggaggagctgagtgggaaggcagcctcagggagcttccccggaaagatgggcctgctcattccatccccgacaggactgtcagtcatttcacaaccac

SEQ ID NO: 315 - DNA, 103 bp, Homo sapiens
gcgcccccttcgtcacgtccccctcacgacctccccctcacgacgccttcctcacgacgtgccctcctcacgacgtccccgtcacgacgccctccacacgacg

SEQ ID NO: 316 - DNA, 62 bp, Homo sapiens
gacgtccccctcaggacacccctctcacgacgtccccctcacgacgtccccctcacactacc

SEQ ID NO: 317 - DNA, 178 bp, Homo sapiens
gtctggactgcggcggcttccacctggctcccaggtggatctgacggccgctgtgcctctcggccgcgcgggacctttcgagggagccttgtggtcatgtctgctggtcacaggagctgtcctggccctcatggccatgtctggggtccttggagacccagtggtacctgccggcgcc

SEQ ID NO: 318 - DNA, 108 bp, Homo sapiens
gggggcggggggggcggggggagcgggggggtgcggggggcggtggcggggggaggggggcggcagggggcggtgggagcggtgctaactccaggaggacttcccggc

SEQ ID NO: 319 - DNA, 896 bp, Homo sapiens
gtgcaaaggtgaccttggcagatgaatgactgcatgagagcagctgcacacagagctgtccctccgccctctgtcctgtgacggtccccacagctgtgcccagacccgtccctccatctgagacagtccctgcggctgtgcccagacccacccctccatcccgagacagttgccacggctgagcccagacccgtccttccatcccgagacagtccccatggatgcgcccagacccgtccctccatccggagacagtccccgcggctgcacccagacccatccctccatcccaagacagtccccgcggctgcgcccaaacccgcccctccatctggagacagtccccacggctgagcccagacccgtcccttcatcctgacacagtccccgtggctgcacccagacccgtccctccatcccgacacagtcccccagtccccgtggctgagcccagacccgcccctccatcccgacgcagtcccccagtccccgcggctgcacccagacccgtccctccatcccgacgcagtcccccagtccccgcggctgcacccagacccgtccctccatcccgacacagtcccccagtccccgtggctgagcccagacccgcccctccatcccgacacagtcccccagtccctgcggctgcacccagacccgtccctccatcccgacagtcccccagtccccgcagctgagcccagacccgcccctccatcccgagacagtccccgcggctgagcccagacctgcccctctatcctgacacagtctctgcagctgagaccagacccatcatcccatcctgaggcagtctccgcggctgcacccagagccgtccctccatcccgagacagtccccggggctgagcccagagccatccccccatccc

SEQ ID NO: 320 - DNA, 190 bp, Homo sapiens
gaggtccagccctctggctccccacccagtggccccccaagccccaccctgggcccccagacgcccgcacaccaacacaagacaggcacctcccaggggtccttgctctgtggtgacagccggccggcccctgcggtgggagcgggagtctggggtcgggaagggtctctgccgggatctcgcgggctcc

SEQ ID NO: 321 - DNA, 420 bp, Homo sapiens
gtaggtagataagagacaaacggttgcactcctgagtttctgattagccttttacggaatgcacaatttacaggaatggtcactcatgcctgagtctggctcagtgaaatgagggcagaggaagtgatcagctgtgtgcgtttgtctcacgggagcagtggggtgactttgagttctgtctgtgctttgtccacaaggaatttctttgtgggcaaatcgtgaggcaggcgtgtagctttttaaaatctttgtagttcccttactcaggaatagaatgggaggcaggtttgcctggcacagttcccagctggacttttctcttaggctcagcgatctggggtcccgagaatgattttcctttcacaagatgaacatgcagctcaaagggggagtgggatgtggttgcggcctcaactgaac

SEQ ID NO: 322 - DNA, 258 bp, Homo sapiens
gctgaggcgtgacagcgcgtccccgtgtgtacggtccccgctgaggggtgacggcgcgtccccgtgtgtacggtccccaccgaggggtgacggcgcgtccccgtgtgtacggtccccgctgaggtgtgatggcgcgtccccgtgggtacggtccccactgaggcgtgacagcgcgtccccgtgtgtacggtccccgccgaggggtgacggcgcgtccccgtgggtacggtccccgctgaggcgtgacggcgcgtcccc

SEQ ID NO: 323 - DNA, 86 bp, Homo sapiens
gtgacggcgcgtccccgtgtgtacggtccccgccgaggcgtgacggcgcgtccccgtgcttacggtccccgctgaggcgtgacggc

SEQ ID NO: 324 - DNA, 237 bp, Homo sapiens
ggtccccgatgaggcgtgacggcgcgtccctgtgcttacggtccccgatgaggggtgacagtgggtccctgtgtgttcggtccccgcttaggggtgacggcgtgtccccgtgcttacggtccccgctgaggcgtaacagggcgtcccctcgcgtacggtccctgctgaggcgtgacagtgggtccctgtgtgttcggtccccgctgaggcgtgatggcgcactcgccgatatgagac

SEQ ID NO: 325 - DNA, 763 bp, Homo sapiens
cacctccagactgccacccatcagtccttctaaaatcatgatctagttacattactttactttatttcttacctctacctgatatactgggaatttcatcatttggtctctacctgccatgtttctcttctcgccattcaatatgcccctctgtttcttgctcttcttttggcattgaagtcttatgtaagattgctggtagatcttgagcactgaaggctaattgttccatacccctgtcaaattgttcatggtgtttattttctctcttgagaaagggaaaccatcagcagaatctccatttctacatagagtaagttacaaatatagtggaatttgtatagtggtgtttcagatgtcctattctctataatacctttcctgtcttcctgaggtagcatacctaatacttctaatataatatctaaatgatttaagaaatttagctatttacatatgtttctccaacagactgaaaactttaagaccagtggtttatttatatttacatcttcaaaaccttttttttttttttttgagcggagtcttgtgctatctcccaggctggagtgcagtggctcgatttcagctcactgcaagctccacctcccgggttcatgccattctcttgcctcagtctcctgagtagctgggactacaggtgcctgccaccatgcctagctaattttttgtatttttagtagagacaggatttcaccagttagccagcattgtctcgatctcctggcctcgtgatctgccc

SEQ ID NO: 326 - DNA, 2321 bp, Homo sapiens
gttgtgggttttgagactaagccaaaccactgtttgggcttctgagtggggcaggtctagcccttgtattttaccaaaatgtgctgtggtcatctccccctctgggcagggctttgtggtgggatctggggctggcatggaggctgattgtctagggattcaagccaggtagaacttcctatttccaggggcaaccagcttgactttgttggtttgttatacttttggctaatacccctaatcacataccactgctggcagttacatagagctaccaccaagatctgcatgtttgtcactatgagctctgccttcctcctctgtttctacctgatcacaggtagtctagccatgatattacccctatgctccttgcaaggtgagaccagagtaggcttcctgggaagtatcttggaatgcagggaacgtgaatgtccacctctagttctcttttcctactgtagaaactgtgggcctagaaaaattctaagtggtgttgtgctgacttgagagaaagggagaggtgatgtggtcagagtgagactattctttttacccttttcatgtggcattttgtttggttctttagtttacacaggtttctcgggcttaatcctgagttttgaagtgttcacataggagtttttgtctgtgtacagttgttaattgaacattctatgaagggtagggaaaactgggacctcctattcttcaatcctcctgatgtcacagagagcctgcattttgaaaagatccataggtgatggtgattgatatggacattaaagttgagaactactaggttaaacatctatttcatgtgaaatatgaaaaataagctagattttgagttgcagttatagggtaatacacatttttcaacttttttgtctttactcttgtccataagaggctgcaactgatccaaaaacaacttattcccaggttatagcaaaggttttcaaactcaaacaatgtagaattacaaaatgtagagttcacatcttctctggttaagataatgttgactaatgaaaataatggtagattggaaaatctatttgagttactatactttcttgtacctaagataaaatacccatatgatgattattgttaatcctctacagaaacatgatgaaaagaagttttagtcaagcagaggagatagaaagcaagatcacagggggttggggagtgaatatgaaatgaagaagtaggggttgactatactctttcatgtcacttggcaccctccaaagtaaaaggaatttgatgtaatcaatttgccacccattgctggctggttttctcaaagattggtgccatattgagggcttagcattggtttctcatcgaggctgcatcttcagtggctcagtgatttgtcaccaaccttggtaagataatgcctgtattttttggcttgtggatattttccatttatacaactttctttgtattcccttttataagctctgaggtgaatgaaatcagagctgactgacatttttagatgacttattcttttcacctaggtattgagtgcctccactctggaggatactctctaatgggcacagagttgagaaacaaagatctgcatactttgtgcttattctcataggcccatacataggcctccacctcaaatttcattaaatctgatttttctgtattttgggggggctttgcttagtgaagtttttttacaacaatcattattctacacatatccttatcttgcatagcaagctatttttcccaacattcaaagtggacaactaagtatattgctaccaaatcattggtttatgaggatttcctccaccactacattctatggctaccctggagaggcgttaagctgcagcattagtcagtttttatcttgtctaagtgtagattcagacaatccatttgtgagccaagcctgaggctgtttcttcctttattagctggttgtgtgaaataccatgaagccataggtatgaactgaggaagagatattgtcacaatgaaggcatgtttgtatcttacggaaatgctttttactgtatcaaatagttttcaattctttctatcaagtgccagcaagctcaatatgagatagaatttaatattggtaagataagattggttaatgatcaacttgaagataattacaaatatgggcactgtgcacatttataacagttgagattatattttattaagaatttctatcattttttctcatataattaagaaatataaacaaaactggcatggacaggtgaaactcagtgctaaatttatcagcactttaaagagagcccacc

SEQ ID NO: 327 - DNA, 198 bp, Homo sapiens
gggtggggcggctcacgcctgtaatcccagcactttgtggggctgaggcgggtggatcacctgagatcagcagttcgagaccagcctggccaacatggtgaaaacccatatctattaaaaatacaaaaaattagccgggcgggcgtggtggtggacgcctgtattcccagctattcaggaggctgaggcaggagaatc

SEQ ID NO: 328 - DNA, 678 bp, Homo sapiens
gcagtctacagtcctccgctctaccagctgagctatcgaaggatgcacactgttaaggctgggtcactggactttctgcaaatggaggaagccaagtccctggaccaccggagatccaatactcgttgagttaattggaacccgacttggaagagaactctgcgccggtctccactgcgcccctttccggacagagcaaatcctctgggcccgggggggtgcctggcgtctctggggcgccgatagccacgatccacgaggaggagctctcacctgtggccttcctctccctctgcatcgctctttctgcttgtgaagatgacagcccttagtggccagagggaaaatgaggtaagacggcgagggcagagggcttggtgagactgatgggtgggtccagtggaggagaggacactggaggaggaaaagaggagaaccagcatgggcgtggtgtaagcagcttccaaccccagcctagcgtcagggtctgatggaagaccataagggggcactgccctaacagcctgtcctctacttcccaccacctcaaacacactcctctcgatgtgcgcggcccttctacccagtgtcctatgctcactttttggagtattgaggcataatgggaagagagggaggaaatgcaggaggataggtggaggccaggtatggtggctc

SEQ ID NO: 329 - DNA, 69 bp, Homo sapiens
gtccagcggctccgcggggccgggggcgccgccggcttcgctgccggagcccagggagctgagggagcc

SEQ ID NO: 330 - DNA, 183 bp, Homo sapiens
gttatgtaatctaagcaactcctccctcggagcgctgctctgaccttcctaggcccggctgacctggtgcttcttctcggtgtccagccgccggcgtgagtgcagggagctgagtgcctcccggaacgtggcccgcagggcgcgctccatcagcgccttgtggtacactcctgccacgttccc

SEQ ID NO: 331 - DNA, 639 bp, Homo sapiens
gaacagcaactgggaatcaaaagggaagcaatgtccaggaagcaacctgagtgtgtggtggaggcaggtatgtggcgtcatgatctctaagagcctgggggcaccgtgcggggccaggtctgtgatctttcacatcaactcatccctcgccagagccctgcaagtgagtcttgagagcccggaagaaaagggaccacagcctctatccccagagtttagggttagggtggggtcgccatcctaggctttagaggaagcactgccctgagattagagagtggtctggggaaccaggcctctaggattccttcctgttgtagccggctgtgccctgaccttgtgtgccaggccattgcccactcccagcccccagcatccccacttcctgccatagcagagctgtggtgcctccctatccctcactggcagctcccacccccatcccagtccctccctgcccctggctgagctcagactgactagcattccatcatgtttattgactcctgggggacaggtcacaaagtcagtttgtgggcaggccagactgccctagaaggaagtcaggggcctcaaggggtggcactcttccttaactcgtaactcttggaggcaagcttggaaggtgctttatttccc

SEQ ID NO: 332 - DNA, 147 bp, Homo sapiens
gggtggaagtgacccgattttccaggtgcgtccgtcacccctttttttgactcggaaagggaactccctgaccccttgcgcttcccaggtgaggcaatgcctcgccctgcttcggctcgcgcacggtgcgcacacacactggcctgc

SEQ ID NO: 333 - DNA, 178 bp, Homo sapiens
ggtcggcgaacatcagtgggataaggtaaaatggctgagtgaagcattggactgtaaatctaaagacaggggctaagcctctttttaccagctctgaggtgattttcatattgaattgcaaattcgaagaagcagcttcaaacctggcggggcttctcccgcctttttttcctgcggc

SEQ ID NO: 334 - DNA, 162 bp, Homo sapiens
gaagacccggagcccgaccggaagaagtcgggcaacgcgtgtgacaacgacatgaactgcaacgacgacggccacagctccagtaacccggacagccgcgacagcgacgacagcttcgagcactcggactttgagaaccccaaggcgggcgaggacggcttc

SEQ ID NO: 335 - DNA, 341 bp, Homo sapiens
ggccaacacagcgaaaccgtctccaccaaaaaaatacgaaaaccagtcaggcgtggcggcacgcgcctgcaatcgcaggcactcggcaggctgaggcaggagaatcaggcagggaggttgcagtgagccgagatggcagcagtacagtccagcttcggctcggcatcagtgggagaccgtggaaagagagggagagggagaccgtggagagggcgagggcgagggcgagggcgagggagagggagagggagctatgtaccctttttttgagaaagtacatctggttaagtatgtatttttcattgaaaactaaagttaaatcaggactgatggcattttcc

SEQ ID NO: 336 - DNA, 117 bp, Homo sapiens
gaggtcaggagatcaagactacggtgaaaccctgtctctactaaaaatacaaaaaattagccgcgcgtgtagtcccagctactcagagaggctgagacagaagaacggcgtgaaccc

SEQ ID NO: 337 - DNA, 271 bp, Homo sapiens
gcgatgtgccaggagtgaggcagcttctgctccaccctccctgctgccagcgtagccgaatgggctgaggacgcccctctcctggccctgcctccgcggtctcactgcacctgtatggaaaggtgttgggccctggctcctcaacagaaaagaccctcccccacatcctgctttgccactcctgcagccttcgtttttaatatttatactgaacggagcattccttgcccaggaggctggggaagaacctcaaaactggaagcaagggctc

SEQ ID NO: 338 - DNA, 122 bp, Homo sapiens
gggcgtgatggcgggcgcctgtagtcccagctactcgggaagctgaggcaggagaatggcgtgaacccgggaggcggagattgcagtgagtggagatggcgcccctgcactctagcctgggc

SEQ ID NO: 339 - DNA, 71 bp, Homo sapiens
gggaggcggaggttgcaatgagcagagatcgcgccatcgcactccagcctggggaacaagagcgagacttc

SEQ ID NO: 340 - DNA, 238 bp, Homo sapiens
gtggagaaaggcaccgtacagcacaaaggaaaggtggaggggccaacgcaagcctctcaagcccagggggcatccttggcagctgccccaccctcgggtaggcctaggggacaactgggacactcagagccttgggagatagcagaaatcctcttggacgatcacctcaggggatttgcccggaggagaagcaagcagctctctgcacaaggaaatgcaaataggtttacaagtaatc

SEQ ID NO: 341 - DNA, 970 bp, Homo sapiens
gaggaagagaagcaaaatctattctcacacctctgggtggttaaggttttgccttgtttagagcagggaggatggatttctcaaagactcttctgttcccttctactttggctttggttcagagctgcaggcagctccagaatcttcctgaagagctgggtgctgtgtgatttgaagggctgcaggaagtcatgggtgtgtagacctctggcttttctcctaggtgggctgcaggaagtcatgggtgtgtagacctctggcttttctcctaggttggctgcagccacctccaaggagatgtgttgcaaagtggtgacaatgccccctaggaagggtttggataagggtctccccactcatccactgcctaacttttgcagctaccagggaatgctcctcctgactccctgggtttgttgtcatctccctacctgtttgtaggatgtgtgggcatttttttccaacctgcagaatccctggcaggaataggctctctgggccttgtttgtcgtggggctactggtgttgcaatgggctgtctctctcgagtgtctgtttccagctccactctggaaagaaaggggccaacgccgactctaggccggcctgctctgtattcattcagctccagctcaacttgagcaatcagagccagggttgagggcaagctacattcttttctgcctttctgctgcaggatgcagtttgctttttttccatgcgaatgaattatgtttgaaaccgaaatgggaggaagagaaaaatggagtgagtgtatatgggtatgtgtgtgtgcatacctatataggcaggggagggcagcaggcacattatttttccattttcctttaattaaggctctgtggaggtgtgtttgaaaacagagggtctcctatgcctttgaggagggtgagaacactgttttggctgcgtcccgggccatatgcagcgtatggtggccaatgaaacc

SEQ ID NO: 342 - DNA, 33 bp, Homo sapiens
gtctccggtcaccgaacgggacggcgggatggc

SEQ ID NO: 343 - DNA, 529 bp, Homo sapiens
ggtaacttcaagagctgcggggagcagaggccacaaccggagggacactgtccccgtcctactgggaagggccgctcctatagcaaccagccctgccccaggaggtccacatggtgcagtggactgcaatgtctaaagggcatccggttgaggccacaaggtcatgctctgtgacagcgtgagaagaactgcaaacatctcactgaggtttaagataaaccaaagatgctgagagaacaaatgtgacaggctcctcagtattcacggctgctttcccgcacgtcagacacagccaacaatgacaaacacgtgacctcctccgagaggctggtgggagcacgtgccccatttgacccccacggctcttgctgtttgctggtggcagcctctccacaccccctaacccccagccactctccccggcgttctgtggcccacacccctcatgactcaccaggctcagcaccccaggggccgggtgagggctctcccccaggaacactgcccctattctctgggctctgggatc

SEQ ID NO: 344 - DNA, 197 bp, Homo sapiens
gacaccaggatgcccagagccaggacccactcctcatcttatgggatcagaagagacccgcgcgggcctgagttaggcctgggctttcccgggttccctggatctccaccagcctgtgcctttgagtgtcagagtacgttttttggcaaaggacaactcctgacgctccctctccctcttccatacacaaagcatgc

SEQ ID NO: 345 - DNA, 120 bp, Homo sapiens
gcgcccggctaattttttgtatttttagcagagacggggtttcactgtgttagccaggatggtctcgatcgatctcctgacctcgtgacccacccgtctcggcctcccaaattacaggcc

SEQ ID NO: 346 - DNA, 146 bp, Homo sapiens
ggggcctccaggacggttcaggtcgccgagctgccccctacttcccagacagctgctcctacaatttgggcacatagtcgtcccactcggcctggtaacacgtgccggccaccgggaccccgagcgcgtactttttacggggggac

SEQ ID NO: 347 - DNA, 277 bp, Homo sapiens
gtcactgttcagccaaggtcggcacatttcctgtgttcattcttcttcataaatcacatctccagcctgctaatcgccgtggacgcatttcgagggatgctttgcaattttcactggctctggtgttgagaggtcccctggctgcttctaggcaagccaagggctttccctctaaaaagccgtgtgtcccacatccaagtgcatacgcgggttgagagggaaggaagtggatgaagcaggcctggaggaagatgctgagggcccgggacctgccccc

SEQ ID NO: 348 - DNA, 594 bp, Homo sapiens
ggggtgcctctcatgcctgacaaataatgaattagagagagatcagaacatccaagaccaaaacagtcattaactgccactccccccagaccccctcccagaacatgccggctgccagaagccggcccagacagtccagttaggaaacaaaaagatggaacagaaaggcctctttgagcagcctggttattaagagctctagacagggagagagagtgtgtgcagcttaactcaaacatttgtgctgaaatgtaaaaaacaattatgacattcaattattccattaagtgaaattaaccattcttcttgttctttgaaaagaccaaaaggaagcacagatctgaataattaggtcagtgaagaattgtgaagaaaggatgtctggacttttattttcatttgaaagtaggaggaggattttgcgttcgggctgtgtgtgtgtgtgtgtgtgtgtgtgtgtgtgtgtggtgtccgtttgctctaagaacgcctttgaattcccggggtggtcatatgcgagactctgccctggcaggtatggccaagtctggatcaaggagtggcattcccactttgatgttgactgtcacgctc

SEQ ID NO: 349 - DNA, 678 bp, Homo sapiens
gcatcagatgaaactcaagaactgtgctattaaccttgcaccagcatgccacaaggggttataggaaagacgacgtaagagaatctatgtattacaactgcacgagccaggtacccaccggtaaggacaagccgagtctctcggctgcaaaagactcaaggaagcagcagctgagccagttctttggggaagcaggggtttcagatgacactgaaggaagacaggactttagacagtcagaaatgaggcagtggaagggacaagcccaggcaatgatccaaagccctggaagattctcagatggtcagactcaaacagagcccccaacacatgtctggaatatagcaggtggtagcagaaaagaaagaaaggaggatgtaaaagaggaagaaaggatgggggagagaagaacgaaggaaggaaagaaacaaagaagggagggaggaagggaagaaaaaaggaaagaagggaaagaggaagggagggagggaagaaggaaagaaagaagagagggaggaaaggactgaggaagcagggagggaaagagggaggtaaggagaaggatagttagagtccagacctcttcccagttccccatctgtggccagtgcgatgctaaccacttctcccactgcctgaccccacacagaaggccccttgttctgcagcctgctctgc

SEQ ID NO: 350 - DNA, 307 bp, Homo sapiens
ggcttccctctgcaaccacagagtggtgttttaattagtcaagtcttcaaatcattgtttactgctctccactcatgaagggtttattaaaagctgggccaagttaaaaatactggcaacagggacatgcaggccatcggagccgccgaaacaggcgccctgaaccacgaggaagccgtggtggctcctccccagggaatccctgcccacgtcctgtcggtggcccagctggcagacaacccgtcagccatgtggagggagacagggtggccccttgcagctgtgccagcactgctcagcctgtgcc

SEQ ID NO: 351 - DNA, 405 bp, Homo sapiens
gatctcggctcactgcaagctccacctcctgggttcatgccattctcctgcctcagcctcccgagtagctgggactacaggcaccatgcctggataattttttgtatttttagtagggacggggtttcaccgtgttagccaggatggtctcgatctcctgacctcgtgatccgcccacctcggcctcccaaagtgctgggattacaggcgtgagccaccgcaccttggcctgaacaccctgttttttaagaagagtaagatagggtagagtttaaaagactaaataaagaaaaaaaaagaaaagaaagaaggaaaaaaccaacttgaacactcttgaacatcagggatggggctacccccacctggcgctgcttgttatgtaaatgactctcacccgaggaggcc

SEQ ID NO: 352 - DNA, 158 bp, Homo sapiens
gcggctcaccagttgcccgcgactcaccaggtgcctgcggctcaccagttgcctgtggctcaccagctgcccgtggctcaccagctgcccgtggcttacagttgcccgaggctcacagttgcccatggcttgctaattgccagcgatttgccaattgc

SEQ ID NO: 353 - DNA, 258 bp, Homo sapiens
gtcaactcatgcccttgtggggctgcagggctgacgcgggctggcactgtgtctacgacagcctcccgggcccccgggtgcgtggctgcggatgctctctggcggccaccacagttcccacgcgcggcgggtgaatgcgagccccttgtcaatgcgtgcccctcgcctctgcccccgagaggctagcaaccgggcctgccggcgtctgattggccgtgggggcctgacgacaggggctcctggttgctgattggcccc

SEQ ID NO: 354 - DNA, 3686 bp, Homo sapiens
ggggctctagtccctggggctcctggcaagctccacaggctgtaaagggggtgttttctttctccttcgtgttacctgacatattaaagcagcgccccatgaggaccccaacgtcccacgtctctatctccccaacagtgcgcctgtttatgaaaaaacgagccccccacacgccgtcccaaggctcggcgcctctagtgacctgacggtcaatgttcacctccctagtcattagctgtggacgtagaaatagcctttctcccttcttttcagccctggaatctcccgtctgctttacagtcaccttgtgggatcgttgggcatggggggctccctctgacgccgcttaaaccccccaaagaagtgcgggggagcgattctgacttgatgccctcggcggggcctctctgctgtcctctttggggccccttgctcatcctcacctgctttctgtcaccgagcactccatccttgtcctcctggctgccacccacctgtcaccctaagatagatcctcggtccctttcaacagcattttgacctttgcgagaggacatttgattgacggccctgcacgctctgccactcagagccgggcagagctgccgagggctcccacctgttagggattaactcccatgtgccagctccggagccgaggccgcggcagggctcggcgcaacatgtgtcgctgcctgtttttcggggcgctggggctctttcaaagggcatgtgtgtggggatcaccccaactttgaggggtagctcaggcatctccacatgggacacagtccgccctctaaaagtactttccttagagggcacggctcctgtctggattcttattacaaccctggtgtgtgtggtggggggtacccctggttaaggtggaggaagcggacccagtggaagaggaaggggcatagcgggttccgcgaacatgagttgtaagcggcagagcccgggactccacagccagggttttctgactcggagacgcggagctctgtctcccatgtcaaagagaaccagtcagaaacgcacgggtgggctgggagggggtgacagcctctggcttacatctgggaaccagttatgtcgcccgggcattttattttcctgaacaataagagaaagcatgattttctttcgctaagcccgcatcctccgatggatgttccgaaaccgccaggtgtgggatctgcgccccgacagccccaccttggccatcggccgcctgaggacggccagccatcggggcgattccccccacacattgtgcctgaattcaccctgcctggcgagccgggctcacgcagggaaaaagcacccgcgaccacagggtgttggtcatggcggccaggggcactgcggcagaattttttcctcccttctttgctgcaatctgggtgcggctagagcaatttgtcatagaatctggggggctcatttttccggccaatcacttttagagaaatgagcgcattgcagcagaatgcgctgacgtcagagaccaccccttctgcgcctccatataaaccccacccagccagcccctagcgcagacggcggagagcagagagggagcgcgccttggctcgctggccttggcggcggctcctcaggagagctggggcgcccacgagaggatccctcacccggtgagtggttggccatccttgccgcaaaggatgtgcaaaaggaagacggcatccgcttctgggatgggctctgtcctcctggacatgccgagagcctgcctgatcctgggtcctgctgctggaggcggccacttcgcctggtccccgagcgtccgcaacaaaatttgtcagaaagaaaatcttgaggcacatttccctggggggaagtcagggctcctctctggagggtccagtccttaagggtgggctgggtggtagggacttcagttcagaggagcgggaggaatcagatggaactcctcttggattcgggtatacggcagtcactggggggcgaaccccggatttcctgtattagaagccgcctctagaatcgcgttaatagtgggagatatggcggcgatgccttctgcgtgccccatgaattagggggggaagcacccgaatagaagggtctcccgggcatatttgcctcgccagctgttggccaggtttttggtggatcgtgggcgggaggagtggaggttcctcttcgcgaggttttccgaatccaaatacacaggtttagtgcagtgtggaccccaggcaaaatgtggagtaaaatttctacccgatatcatctggttctgccctgatcagccactttcacagtggagagagatggcgcccaagtgcaaacctgccagtagccccctaggatcagtccttgccgaaggggggtcgtgggattgggggcactgggagaatagatgcagggggtgggttggggaggagagaaggccgtgtccttgggtctgggaagagggaggagagaaatgcagaaaagggggtgtgttgctggggtctggacgctgggagctggggatggggtgccgcgggggtcttcagagcgttgcgtggtggtcgctcgaaaatcctgacatgttgcagtcttggacttttggtcaaatcgccttttgccatttcctttgtcagagtcaagcccccccaggccgccccctcccaccctgggccggcgggcctggtgggggcgcaggcgggtggctacgtggcaggtttctggaaggtttcctggctggccgcgagagggcgctggcggcactgcggaattttggggggcggggtggggaggggaggtggcctttgttctcctgatggagggggtcgggcgcgggatctactggaggatcctggattcgtttacccaagagggaacagttttgagaccccccggattcactgcggagtggccgcagaggccggggtcggcctttgcgccgtggcttcgggtgttgtggaggcgcacagaggcacgttagttgatttccagtggtttttggtttcgggggtcttaggaaggtgtggctcatttgagcaggatggagagagaggctgtgacaaggtcagtgaggggccatcgtgcgggggctagaaattgttgttgtggcgaaggagggaggcacgactttggaggcgtgatgttgatgcctgggggcgaaggcggggagcggcgtggtggccccctttgcgttactttccagcgatgtcacaggttctgtctctcgttccgagaccacccacatgcgtgacagcggtgcctggaggactgggtctttctgactttagtgaacgtgtgtttaattggattgacgaaggtgggagtcgggatttctgcttttccctgtagcaggcggagcggcgctccagaggggcctggcgcaggtccgctgggtggcccaccttcctctggggctggggcccggtggctgggggcgcaggaggcgcctggtgcgggcgggaggcgctgcgccgcagccacaggtgggctctggctggtggtggctggagaggcgtccagggggcgtagcgacctggcgcggtggcctggggtgggctgtggagcccttcctagcctgagacctgttgggcaccccctgtccatccaggcccgccgggcgcgggccggggcgccgcaggtggctgctgcactcctgggttacgggtgcgggccgcgcgccccctagc

SEQ ID NO: 355 - DNA, 100 bp, Homo sapiens
gttctgattggaaggcctcgagcgggggcggggcttccagggtgcgcttccgccgtcgcctgttcccgccgcggagacccggcagttgggggatgccgac

SEQ ID NO: 356 - DNA, 432 bp, Homo sapiens
gtcagaatttgtatcttcccctggatgggatccttcttatcttgcccgtccccgtttgcattcgaatgggcttccccctgctttctgctgactctagtccggcaggccacagggtgccagggttcggttccctcagctggccagggtcggaggcagccatgcccctggatggctcccctgacagcgccagccctctgcggctctcacacctctgtggggcagttcattcccttatcttgcaagtgctccccctcagcctggggagcagcctgcgagggctgggccagggggccatgctcctccctcctgccctctcctggactgagctgctctgcaggacctgagcggctgtcctcttctcacggaggcgcccggagcccgccgccccctcattctctgtgccgcacattcggtgctgacaggctgtgcacc

SEQ ID NO: 357 - DNA, 56 bp, Homo sapiens
gggggacggggcggggcgggggcggggcgggggggtgggcgggggaggggcggggc

SEQ ID NO: 358 - DNA, 124 bp, Homo sapiens
gagccccttctggccccatcctccagctcccgccgtgttgctcagagcagctcacggtgggcacgcggcgactctgaggaatgggcgttcccacagctccccggcttccgtgacggccacgacc

SEQ ID NO: 359 - DNA, 444 bp, Homo sapiens
gattctgcagccgccccctccccacctttcaaattctgaataacacgaggcagggacctctcctgtcaaatgagcaggagtgagcacatggagccactgcctgaggcccctgggccccatcagaacgcctgagccgcccaggaaggggctcccggggagtctgcctccttcactttaactggaccaagggttctggaaaccctcccaaacctgggaggatgaactcttgctggtccagggctgtgccgcccagtcacgccaatgccagccggcaaccctgggtcagagggctgcaagcacttctgcaaaaccaaaggaagtggcagctgcagtggaaatgcacgctcccctcccgggccccagccgcaggcagaggctcacagcgaggcccctctgggatccaggcctgtatgttgagagcagagactagccaggggcagagcc

SEQ ID NO: 360 - DNA, 450 bp, Homo sapiens
gtccctgcactgctcctgctctggaagcctctccggaacctcagctcctcagtggcctctgctctgctgggcctcagcccctcccctcgccccaggcctgctgcactctgggcctttctgggcctccctggactcttccctcctcccgcccgtgcactcagcacagctctcccctcctctccgctgctgaccacagccctgctccccgccagcaggtgccccagccccatcagctggctctgagcccagcccctgtccctcccctgtccctgcctctgcctctgggctccttggcttccacccttctgtcctgctgccacactcaccctcgctgctctgctcccggctcacctgctgtccttggtcctggctgagaggagggccctacggccagctctgctgaccctgccctgggctctggtgatgctgccggcctggacaagcccctcc

SEQ ID NO: 361 - DNA, 713 bp, Homo sapiens
ggaaggcagaaaaagacacacctagctatggttatatatttatatcaatatcattttctaatcatacaaacacatgcattagaacagatgtagtggagggtgtctggtggtgaaacatgatggtgacacaaaacgcctcatccagccccttttcacaccagctgcacctgccctgaagctgagccttgaacctgttctttctgaatccccacaattgtcctgagcccctcgctgtaccgagcaccctttggtgtcctgattttcctccatggttcctgagagcccccggctacctgcgtgcctctacaatggtcttgagtgccccttggtgtcctgagagccccctgggctccggagtaaccccttctgtcctatgcatccccacagggaggttttggtgtgagttcacactgtgattccctcactgtgtcttttgcttaaaaatatatggctatgtgattgttgctcatgtagctcagctgtaggaagaactgtttttggacatggatctggggatggtgactggactcttgaggaaaggggagtaatgtgtgctcccttcatgacctatgcacccaatccactccattccctcccagagaggggctgatggatgcagctccaggaggaagcactggttgtgatggagaatgcagagatgacacacatgagggagagggtctgtgagggcttcaccaggccaagagtgcacc

SEQ ID NO: 362 - DNA, 1324 bp, Homo sapiens
gaatgggagaaaatgtttgcaatctactcatctgacaaagggctaatgtccagaatctacaatgaactcaaacaaatttacaagaaaaaaacaaacaaccccatcaaaaagtgggtgaaggatatgaacagacacttctcgaaagaagacatttatgcagtcaacagacacatgaaaaactgctcatcatcactcgccatcagagaaatgcaaatcaaaaccacaatgagataccatctcacaccagctagaatggcgatcattaaaaagtcaggaaacaacatgtgctggagaggttgtagttcttcttgtagagatctttcacctccttggttagctgtattcctaggtatttctttttttgtagatgttgtaagtgggatcgtgtcatttatttttctctatgcctggatgtcgttggtgtataaaaaagctactgattttcgtatatttattctgtatcctgaaacattactaaagttgtttatcaattctaggattcttttggcagagtctatagaattttctatgcataggatcctatcaacagcaaaaatagatagtttgaattcttatttacttgtggggatgccttttatttctttctcttgtttgatttctctggctagaacatccactactatgttgaataggagtggtgagagtgggtattcttgttttgttccagttatgaaggggaatgatttgagcttttgttgattcagtatggtgtcagttgtgggtttgtcatacatggctcttatcattttaagctaagtttctttgatgtctagtctgttgaaggtttttatcatgaagaatgttgaatcttattgaaagtttctctggatctattgagataattatatagtttttgcttttgattctgcttatgtggtggagcacctttattgatttgtgtatgttgaactagccttgcatgaaaggagtaaaatctactggatcataatgtaataactttttaatgtgctgctatattcaatttcctagtattttcttgaagatttttaggtctatcatcaggaatattggtctaagattttcctcttttgtgtatctcccagattttttgttccaaggacacacaataaggaaaagattgcctttttaacaaatggtgtaaaaactgagcatccatatgcagaaaaaaatgagacctcatctcatctcatatacaaaaatcacctaaaaatgtactcaaggcttggatataatatgatatctaaaattgtaaactcatagaagaaaacagggaaaaaagaagctttccagagttgatctggaaaatgatttatttggattc

SEQ ID NO: 363 - DNA, 1231 bp, Homo sapiens
gatcccacagaaatgcaaactaccatgagagaatactacaaacacctctatgcaaataaactagaaaatctagaagagatggataaatttctggacacatacactgtcccaagactaaatcaggaagaagttggatctctgaatgagccaataacaggatctgaaattgtggcaataatcaatagcttaccaaaaaaaaagagtccaggaccacatggattcacagcagaattctaccagaggtaaaaggaggaactggtaccattccttctgaaactattccaatcaatagaaaaagagggaatcctccctaacacattttatgaagccagcatcattctgatgccaaagccgggcagagacacaaccaaaaaagagaattttagaccaatatccctcatgaacattgatgcaaaaatcctcaataaaatactgtcaaaccgaatccagcagcacatcaaaaagctaatccaccatgatcaagtgggcttcatccctggcatgcaaggctggttcaatatatacaaatcaataaatgtaatctagcatataaacagaaccaaagacaaaaaccacatgattatctcaatagatgcagaaaaggcctttgacaaaattcaacaacccttcgtgctaaaaactgtcaataaattaggtattgatgggaagtattttaaaataataagagctatctatgacaaacccacagccaatatcatactgaatggacaaaaactggaaacataccctgtgaaaactggcacaagacagggatgccctctctcaccactcctattcaacatagtgttggaagttctggccagggcaattaggcagaagaaggaaatcaagggtattcaattaggaaaagaggaagtcaaattgtccctgtttgcagatgacatgattgtatatctagaaaaccccattgtctcagcccaaaatctccttaagctgataagcaacttcagcaaagtctcaggatacaaaatcaatgtacaaaaaacacaagcattcttatacaccaacaacagacaaacagagagccaagtcatgagtgaactcccattcacaattgcttcaaagagaataaaatacctaggaatccaactgacaagggatgtgaaggacctcttcaaggagaattacaaaccactgctcaaggaaataaaagaggatacaaacaaatggaagaacattccatgctcatgggtaggaagaatcaatatcg

SEQ ID NO: 364 - DNA, 55 bp, Homo sapiens
ggcggcgcggcggagaggcggacagcggcggagaggcggacagcggcggcgcggc

SEQ ID NO: 365 - DNA, 1384 bp, Homo sapiens
gtgtgaggtgtcagtctgcccctactggggggtgcctcccagttaggctgctcgggggtcagggacccacttgaggaggcagtctgcctgttctcagatctccagctgcgtgctgggagaaccactactctcacacttccataatcttttcaaaaattactgaaggtgaaagttaaatctgccattttgtctactttttatataataactattccagaatatgactgaagaaataaactttgtatcaaaagatctaaattcagatagtagcgtcccaatctatgaatgggaggatacttagaagttatctaaactctctatcagttttcttatccataaaataagaataatgtggtttaataaaccttttgcaaaaattaacatacatgttgatatataaaaagacttttttttttttttttgagacaaggtcttgctttgtctcctaggctggagtgcagtggtgtaatctggctcactgcagcctcaaacttctggacccaacaatcctgccacctcagcctagttgtcttcttcagtagcagagaaagtttagtgggcattgcctcttcactcatctctgactaaaatggaaacaaccaattaagaataaagtaatccttttatggaacattttcattttactatgcaaacatctgaatttgaacacatgaaaatcagtgatagccaaaacagctataaaggatgaaatttaatggggggaagaagcaacatggtccttttatttgcagctcattaaactcactggttgtgtagtagaattccacgtctattattaggttagtttggattgtgtgttgggcacacaatgaagcagtcagatgtatagactagggcaataaacacaggcgaaagttgagaatatgacttatttttctctgggatttcaaaatctaattgagcagaaagacatgaaaaaggcagctgatgtatattttcatataagaagtagtcaacttaaacacagggtgtaatgagagaaggcactatctaacacaaactgggagtgaggggggcagttgactgagtaagtggggagcattcagcagaaagtggctgcttgcatagtatgaggagactttataccaaaacaaagatgaaggtcatctaaagaaaagaatacagtggtagaagtggaaaagcttattgatacatacaatcctagataagagtccaatatggcccaagaggaggtaaaataattagtctcctctactcagctctgcagtgctgtagactcttccaacttcaggtttattactgtcgaaaagagaagcagaggctacctaagtgggccagaacacctaccacataatgagttaggctgtaaaaatggtattatcactaaaaatttgacatctac

SEQ ID NO: 366 - DNA, 782 bp, Homo sapiens
ggccccatcacagggggccttcacagtcacacaggcttcacatttggatctctaaatgagatcatgtctctatattttgtgaatatgtattaaacgtttaatttagaagcaataaatatttaaaacatactgaaatgttgggacactgtaaaagaaatgggctgtgtgtagtggtcacacctgtaatcccagtgctttgggaggctgaggtgggaggactgattgagcccaggagtttgagaccagcctaggcaacatattaagaccctgcctttacaaaaaaaaaaaaaaagttgggtatggtggtgcatacccatagtcccagctacttgggaggctgagatgggaggattgctggagctcagggatttgaggctgcagtgagtcatgatcacaccactgcactgcagcctgagcaacagagcaagactctgcctcaaaaaataaataaatgaatgaaagaaatgaaagttgcttggattcttactaacttgtgattagtcttgggaggaaaattagaagactgttccaggaacaggcaattgaggttgtcagaaaagtgagatgttggcaagatgtcaaagagaataagaactgagagaagaccatgatgttcagcaagggggccactagaactccataagagagaggcctgggtattgtggtcagaggaagtcaaggaattagtaaatgctaaagaaagtgggacaggtctcaagcatcctttagagaagtttggcaattagaagtgtgtgtgtgtgtgtgtgtgtgtgcgcgcgcgc

SEQ ID NO: 367 - DNA, 1245 bp, Homo sapiens
gttccaatcactttataagaattaatgaattattataaattaattaatacagcaaacctgtgaactagtcggtgtaattcttgctgttattattcccgttgtcagatgggataaaagaaggtaactaatttgtgacaggggaaagtctcagatagtgaccagtggattcaggatttaaacccacaatgcccgattctggacactcgcgtttaatttctgcggcccttgcagctgccggcgcaggcgctgcacccagcgctgctccgcgcgcccagccccgctgggtcctggaccccgccggcagccggcagtgcctaaaggttagatctgaaggataggagagtgctgagaaggataatgcttttaggcaattaattgtgtgttctttaaatacggacatgttaaccacacggggctaggcagcgcatgcctgagctgtttggagtaaaaaactgcaggactttgcagcttctctccatcctgcagttcacttctgaacttgctccctcctcttaggatattcttagactgcccggacttcacctcagctctgccatcgcccagccttgcactcattccattcggacccccaaatgctgaccggccaggggatcccatgctaccctgcagactggtgtgtgcacaaggaaaccaggtcccagcctctgaggctgtcagtgttttgttagaaaagaaggcacagctgagccaaataactagacaaatgactaaatgtctactttctgagaactgtaaaaacaatattgatgctcaaaaaatatacatatgtatatatcatggcaggaatatagacaatggcagtcagaggaaatgatctctgaagacatttggataggatgggaactagtttatttttctcaagatgcactgcccagttatttccagttattcaattttttatggtatttaaaatcatgggatacaatattggcttataacagtttatatgaaatattgtcacgacaaaactaaaagataaagtcactatcagactataagacatgaacaccagtggcagccacacaggtgggcatttggaagcaaacactgcctggcaccagctgcatagccttgggcaggtgaggaaacatatgcttctcagttcccttgtgttaggagatgagatggtcaaatattgtatagaacttcactccaatgcagtaactactagcctcatgtggctatttaaatttataatttaaaaaatggacattcatttcctcc

SEQ ID NO: 368 - DNA, 1383 bp, Homo sapiens
ggggtccccggaggaggaggatgggccattggggtccccggagggggagggtgggacattggggtccccggaggaggaggatgggccatgggagctccgggagctgaaggatgcaccatcaggactcccggggtcggaggctgggccatcggggctcccggaggtggaggatgcaccatcaggaccccgggagtcggaggcttacccatcgggccccccagcgggggagccgggactatcgggccccctagggcaggaggctgggtcatcggaaccaccggggcgggcagctggccctgtggggcctcccaggcaggctgaggtgcctgccaagcggccaatgaagcctgcaagtcaattggaggtggatcccaagggactggcggagcccgggaggaagcgggcggggcccgcatcagaaccgtagggcggctatagacaggcggcttcggggcctccgccggaggactcgagtcacccagattcttacttagctgcgacatgtccctttgctgacagctggtgggtcttttcctcggacagctgctgggccttttcctccagagagaagagaatgcctacgtggctgttcagaggctccctccctgctgaatgctgaataggaagtgagtgctgctcgctccgcagctttccgcagtaaggaggaggggggaagggggctcaatcccgccccttccccgcccccgaccaccacaagtggatattgcataggggcgtctaccggagtcctggctgacacaggatcccttctcactctgtccagtccccaaatgcagaccagtcagactccacatggatgacttttcacaggggagtgacaggaacccatccatgttttagaaaaatcactgtactgcagtgtggagtgggagcagaccactggaaacatggaaggtatccaagacggcggggggagatggtgtggtctgggctaagatgtgaggcggagaatgaaaaaagcgcatttacataagagagttccaggagttatagcagacagatacctgtattataattgaataaaggagtcaaagacatggaaaaggcacacaagtccctgcctggagaaagtgggaagttgcagggactgttactctcttagggtcccaggagaggcacacgggaagagaggctgatgagtattggcagacacagggcatttgcggtgctgtgggactgccaaggagagataccctgtaggcactcctgtatgatgtcttgggagtcctgcttggctattcctcatgaaaatagagttgtgggagggaatgtggttgcactgggtcttgaagaacacaggcatgttagagacacatggagaaaagggacagcagcgagtagagagagaggaaaagaagtcac

SEQ ID NO: 369 - DNA, 51 bp, Homo sapiens
gcacgtccccgaaggtggagtgcttcttccagggccgcagccccaggatgc

SEQ ID NO: 370 - DNA, 373 bp, Homo sapiens
gaaatgcaaactaaaactacaataaaataccacgttatacccattaggatgactactataaaattaaaaaaacagaaaagtgttggtgaaaatgttgagacgtggaagccttgcacagcgttggtgggaatgtaaaatggtacagctgctgtggagagcagtccagcagttcatcaaaaaataaaaataagattacacgtcatcaagtaattccccttcttggcatatgcccaaaagaactaaaagcatgctctcaaaaatatactggtacacccgtggtcatagcagtgttattcacaatctcttaaatatggaagcaacccaagtgtacacagaaagccaaatagataaataaaatatggtgtatacatac

SEQ ID NO: 371 - DNA, 321 bp, Homo sapiens
gttctgttctctgacaacttctaattgggaagtttgttaggacttggaaatacgctgtgcgggtcaccaaagtagcattagagtcaaataacagaccctaattttggaaagagagcagctgcatgaaggcaatgtgggtagattgacaggccggaagtgagccgtcctagggaagcctcgccacagcatctgagccctgcgcccaccaccttctcttcgctgggggctccatcctcagtggccagggctgattgaacttgttagaaaccagatgcctggtccactcatgccctgtcagtcagaaattctgggagtggaccc

SEQ ID NO: 372 - DNA, 374 bp, Homo sapiens
gtgaggaggcaggagcaggaagggactgggcagggaagtgagggcccctccctgagcactgcacagactgcatactgtggatttgaatgtctgggtcttattccttaaaatggtaccccatgaggtctgccttaagaaaacagaatgagtcaggacggtccctgctcaccgaggaggcttttgggcatcagcaggtggggcggggtctgaggaggagcaagataggagaggggcaggcagggtccctgcgcttgcagatgggcaggctcagggaccttggattctcttgttctcctccctttcgctcagaacccaccatccaactcccttgccctaagagcccctcatcccacaggagtggaggctctctcctc

SEQ ID NO: 373 - DNA, 380 bp, Homo sapiens
gtctaaaaaagaaaaaaaatgcaatctaataatgtccagcaacgatacagggaagcctggcccatgctcacttttccagtcacctgctcttaagtagtgcacgggttaaagaacgatgtgagtgctagtggctgattctttcacttacaaacatgcatgtacacgattgtgttaccatggacaaacacataaaatttgattgtaaaactagttgactcttaactgtgacacattaaatccttgagtaaatgagtgtgtgtttccatacatatattcagtaccactacagttcacaaaatgaacgggacttcttaggttaaagccttgttaagttattctttaaaacgctttccaatctgatagagagctctggcgtattc

SEQ ID NO: 374 - DNA, 2236 bp, Homo sapiens
gcatttaacttttccaaaccagcttttttgtaccgcacataggaagacctgagggtgagtgtaaattaggattgtttggccagtggtgtgtgcaaaaatttattgtagaaccaagaattatttctttagtattttacacattttaaaaaacaggtagacatgtccattgatcccaggttgcttatggtttctagaggccccctctcattgcaacagtgctgtggggccctaggggtccagtagccccctccccccaggtcattccggtgagggagggagctgggacccctgcactgcggcaaacaagcacgcctgcgcggccgcagaggcaggctggcgcgcatgctcaggcggggatgtgtgcgaagcctgccgctgctgcagcgagtctggcgcagagtggagcggccgccggagatgcctgacgcatctgtctgaggagcggtcagtgacgcgatggagcgggcaaggtcagctgtgccggtggcttctctcaagagacagcctggggagcggccacttttattcatcagatattccaagtttttaggacttggagtactgaataaacggaatttgggccctaaagtcctttgttctggagaaccagatccggaatgttcagaggcttgctgttgtgccgttctgccccgatggtatcctgtccgctcgcattggggcgcgtcccccatccgcccccaactgtggtgtcgcgacaggtcctattgcgggtgtctgcggtgggaagggcggtggtgactgggagcatgcggggtaaccgcagtgggcaagggacatgggtggaggtgggtacatcagggtgattgcagttccgtgtggcgagggtacgtggggggaccagtgcatagggattttaggcggaggtaggtatattggagtgattgtggcggggcgaaggtacgtgaagtgatcggtatttagggggtgttgagcgcaggtaggtgtataatagtgaccactgcgtggtggagcagggtacgtggggcgactggggggggaattcgtcgcagtgaccgaggcgaggaggctatggcagtggaccagggggatgagtcggtgtgacagtggtgggggttgtgttggtggtcgcggcgcggggagagtccgtaggaagtggctgggaggtagggggaaggcggcgacagtgggtattggcggcggtgggcattggcagcgggtaggcatggcggtggtggactttggcggcggtaggcatggcggcggtgggcatggcatggaggcggtgggcatggcggccgcggggcctgtcgctgtccggagtgactaagggacgctgaatgattgctgtgtagaggagggggcatcagaaggggcagtagcacagtccgcagcctttaattttcctgtgacctgcgatggtcatctggtttgcctactgtggtggtggtgcttttttattaaaactgcgcaatgcctacactgccgcaggggctgcagaaatgcgtggaatccttgcgtaccctttaggaaccctcgctttagaggctatggcataagaagactggaatgatgtgcagaacttgcatttacagatcttttgactgataggccaggtgatgcctgggggttacttttttttcattgtttctctctgttgggaaccaggtcttggaaggctatgtcgaaataacctgggggtctgtgttgcgtcactgccattgtgcagctccttcaagatggccgccgctgcagcggcttagatctgcgcaagcgcttcagcgggggggtggccgcttcctccctgtagagccgccagtggggagggggcaggtggtgtgtgttcagcttctgctgtttcggagtttcagccgtaccctctttagggtgcagtggtaaggagaggaagccggccaaggtgggcggctgccccctccccaaagtgctgcttgggaaaggatgcaggttgcgcagacgcagcagaggtgacagtcgcctccgcttgcagtggggcgagacgtggggcaggggagcgagggcttacgcagcttttgcctggaaggaatggcagccctccccttcacctggctgatacagcagctgttcctttccggttgtggcgcagtagaggggggaggagggagatgggttggcgcaggctccgcctagcaagcttggcagccaccccttacccacggtgcagcagtagaggactggaggggaatgtggctagaggccaggcatttgtaccacctcc

SEQ ID NO: 375 - DNA, 255 bp, Homo sapiens
ggtccaggcactgcagcatgggctccgggaggtggcaggtgcaggtctgacgacagcagggtcgtggctggctgcggaggggcgcgggaggctgggcgcagaggtggccgccaaggcgcggcttcggagcacggcctgggaagggaggaagggaagagaagaggagcccaggcccgtgccgaccgcagctccacgccagctctcgagccgcgcggccgtcacaggagcccgctccggccgggctttccatacccc

SEQ ID NO: 376 - DNA, 476 bp, Homo sapiens
gactcagagtcagctgcccccagggacttcccggctctcgtgaccttgctgggcatgactttcaggggagccctctgtccaggagacataggtcactcgaatcacacagccgtgctttagtgaatgctagccaggggccctggagagggcaaggacaggacactcctgcatggaaacgaaaatgaatatttttctctgcagaaaatgaaaagtggtgctgggtccaagtggtaggtgacctggcttttgagcgaaaatgctgctgggaaatgagagaaaagaaacatgaaaagaatgcaaatgagggtggtggacaggggcccagaggcctgattcctccaccctccgcaaaggctgggtgtgtgatgcctataaatagacactcaaaacccgttctaaatggagtgaagacatgggcctgcttcctcttatggaaaggccttacataaggtgcagtgctgctattgctcctgggc

SEQ ID NO: 377 - DNA, 45 bp, Homo sapiens
gctgccttgtctgtgggcgacggcgtggtcttttccgacggcgac

SEQ ID NO: 378 - DNA, 118 bp, Homo sapiens
gcatgcgcagttcacagtagggtttgcactcttatgagaatctaatgccaccgctgatctgacaggagccggagctcaagcggtaaagctcgcttaagcggtaaagctcgctccagcc

SEQ ID NO: 379 - DNA, 470 bp, Homo sapiens
ggggctgagtcacccataccagctacaggtctcttccttccccaacaatcgttccacacgcctgcctttcaattaactcccacccgccccgaactcttcctacccagacactgtgggcagggagccaggcgcacctgctgggggcccagggtggtggggctgtgatcagaaaggaagccgcgtggtgacacataaagcagggctgcccccacacgagtccccagaggaatcttaagctccccattgccctggggtgttggtcccagctgccccatccctgcacgcggatgctgcaattacccaagagcacgaaacctggcttcccacctgactgagtcagctgagaacaaaaacacatctccaccgccacaaacagccaggccactcatcagagtccgggagccactggcagagagggcacggccccacactgccccagagacatataggagccaggcaaacaccagggc

SEQ ID NO: 380 - DNA, 565 bp, Homo sapiens
gctaagccctttcatattgtaagctgaggtatttaaaagtaagatgattggaaatttctaaagttgcacacgattcaagagaatgcgaaacatgttagaaagagctactggcacgaggctacagcatccatttattctcaatatacacataatatcaattatagaagacaaccaacaaaagatcttaagcttgtcaggttgggtttgtgtggctgcttctgttcattagaattttgagtaactgggaaaactaccagattcttaatggtttcttgaacaggatatactaggagatcttagcactgttaagaaaaaaaatcacatataaattcaaaaaacctttgctcatctatgtggccaaatggggaatctaaccctccccctttctgtagtttggatttaagtacctgtggtggtggttttttagcttcttctgtggattcattaatatcactttggtactttcaagaacagttgttcttccctaacctgtgagattttactctccattatagaagagtctctcctcctagcctgtgatgatttgatgctgtaccctgtatac

SEQ ID NO: 381 - DNA, 80 bp, Homo sapiens
ggaacggttcacggccgtctaagaaggccgatttctgccggcctttctgccaggggaggagaaaccccagacttcacagc

SEQ ID NO: 382 - DNA, 560 bp, Homo sapiens
ggccaaggactccatttgagaggtaagaggagtgtagatgaagcttgtatgttctgtccacaaatgtgggtgtccacaaacatgcattttagagaacagggaggagaagagaataggagtgcttctgagatggggcagctttcctaggcagctgtgttcccatggaaaattccaagtcagggtatctgaaatttgaacctggtgtagcaggacgagccgcagacaagaatccctcagacaccgagtcgtggaaggaaagggctttattcagctgggagcatcggtggactcacgtctccaaaaaccgagctccctgagtgagcaatgcctgtcccctttaagggcttataactctaagggggtccgcgtgacagggtcgtgatcgattgagcaagcagtggctacgtgacgggggagctgcatgcaccagtaatcagaacgggacagaacaggataggaattttcacagtgcttttccatacaatgtctggaatctatagataacataaccagttaagtcaggagtcaatctttaactaccagcctgggaatgcagcgcc

SEQ ID NO: 383 - DNA, 230 bp, Homo sapiens
gtaacaagcaattccccgagatttctaattctgcccagtgagattttttcccattggctacctcctctgctgacatgatggtataaattctgcgaggatctggaggatcatatttttcctttggcatccctgttagtctgcattcagcgcgccaggatccgggcggcggcggcggcggtggcgatggggcggctggtgctggtgctgcggcggctggtgctggtgctgcc

SEQ ID NO: 384 - DNA, 175 bp, Homo sapiens
gctgcaggtgctgcgcggcgaccggccggcgctggcggcggaggacgagctgctgcaggccgtggagtgcgccgccttcctccaggcgccggcgctggctcgctttctggagcacaacctcacgtcggacaactgcgcattgctgtgcgacgcggccgccgccttcggcctgcgc

SEQ ID NO: 385 - DNA, 73 bp, Homo sapiens
gtggcacgagttccccagcccgcaccagccgcgctatgacacagcgctggccggcttcgacggccgcctctac

SEQ ID NO: 386 - DNA, 627 bp, Homo sapiens
gccccgctcccaccttccctggtcagaacagctgaggtttctgtatgacctaccagtggcacagagaaaggtgagaaaaatgcagaaacaaatttgttcatttgggtgatggagtgcctgctcccctcgccagcatgcagggttgaataatggcagacagggcttcaaaaaattgcagcataaatagatgagccctttaaggtaatagaaatgctgtcatcctggggagaaatatgggccccaaatcctatgggaggggacactggagcccctctcctctgcttcccgcattcccgtctccatcacagtggagctgaaagggagcatctgggctgaggaatggccagagggccccttatcttccagacacgcaggacccatgcgggaggaggcagccggaagggggtctgagaaatcaagtttttgcagccctggcagtgacctcacagacagttcactgcaggcaccaaggtggcagtaattagtcctacagcagtggaggaggctccatcagtctggccgcctaggtgaggccttaattaaggaaaggaagcctagtcagcagaggagcatggtggagccgagaaatcagccttcttcccccgtgtgagcaggaagtctattctc

SEQ ID NO: 387 - DNA, 255 bp, Homo sapiens
ggctctgggtctccctggcatggctccagcccccacgtgcccagagacacaggcagttgctcctgacttggtgcccttggggactggcccagccggaacctgccattctctcgtcagtgccgcctccccgacttggcagggccgtctccttgagctggagcagccctcggtatttccagcttggccccctgcccacctctctggggccttgcagtctgtccctctcgggccaggaccgacgcaccctctccacgc

SEQ ID NO: 388 - DNA, 1125 bp, Homo sapiens
gagggctggcacacatagcctccttcagtgttgggtatcaccgtttctcatcattcatagaaaggacatacatcacacagcacagctccagaggctcctcctccaccaattcttccatctctaactcccaacaccttcgtaaccgcctgaggggtaggggccttaaggctatccgagcgatgctgaccgcttgcttatatgttgtacactgtgggctgttcacttgtcactttgctaatggcctatctatcattttaggggctcagcaaaaacttccactttaaaatcctgcagagacaggagaaagaagcagggatgagagatgaaggggaagtgtggagtgcgtcccctttctggctccagcccttcctgaggccagctgcatcttcttggctcctcttaaaccacattcatggccttccagcaaactcctctttttgattaaggagtattagttggtttgtgttccttgcagccaaaaccaatccagagccaggtgaatgaggcacagctcctcccttcctggagcccagtccagcacaggacaggcaggtgggcagcccatggcagtcccctgcgagctgtgctgggacagggagggtgggcagcatggagcacagagcaggggctgacccaagcccaggtggaaggaaaggggctttttccaaggtcaaacgggatgggaaggaagatggcagccagggcagggaagcagcctgccagaccccaccaagccaagagcctggcatatttacacatcagcactgattatgttacacccatcacaagcgttaacgatccctgctgctggacgagctcacagcccccatgcctttcccctcacatggtcttggtgcacacagtattattcctccattcccaggggaggaagctgaggctcagacagccctaccttttccttccagcagattccaggaagtaaccccaggctgaggtcgcgctggaacatccatctgaggccacagagagaagaggagaaggaggggcctgaggcctccacagagccaatgagggccaaagggaccccccgttctggaagcagcaaatgcttcccaggggagggtgctgaggggaggactgggggctgacaggggggagcaggcc

SEQ ID NO: 389 - DNA, 326 bp, Homo sapiens
gcggtcccaggaggggcgggccttggccgctcgctctcccctcccccatgccgctgcgcttgcgcgctggggacaaccgttgctgggtgtcccagggcctgaggcaggacggtactccgctgacaccttccctttcggccttgaggttcccagcctggtggccccaggacgttccggtcgcatggcagagtgctacggacgacgcctatgaagcccttagtccttctagttgcgcttttgctatggccttcgtctgtgccggcttatccgagtgagtgacgggcctgaggaggcagcggaccggggacaccctgggggaacttccc

SEQ ID NO: 390 - DNA, 665 bp, Homo sapiens
ggaatcacttaaaatctcttatcacaaggggcttaagaaggccttttcttatggatctaaaatcagcaacaacccttaggccaggggggtcatccttttcggggtctgcccggctgcagttcagccccaccagcctgggagctgcaggcctgactcaagaggagcagccgctccaaagctacaggaagccctttttcttcccaggcctctgggacagtttccagctctggttcccagcccactgtctgtcccctccccctgtctgatcccaggccaaaccttggctccaataataacaaagaggcccagaagatgaaaagctgaagtcctttcccttccagctgaagccaggtgtgatgctggcagggagaggttccaagcttggccaagccagatgaaggcatgctaaagcaataacccaaaaacgagccccacatggggccggatgcccagacctttcacttatttcactataaatgagtttcctggggcaaagtaatttctttcttcaaagaaaatcgcagtcaaaggccaaagaagaaaaggcggagcgcaagagggaggaggtgaactggggaccacagaaagacagcaagagaggagccccttggtggatattcattccagggctttccagagagctcaaccaagcccataaagaactc

SEQ ID NO: 391 - DNA, 221 bp, Homo sapiens
ggaatctgccgtgcactctcagcaaagcttggcccacctcccctctccagaggtcgatttccaggtgcagggagaggccaggagagttgctgctcggctgcacacatcctagaacgacaatggagacctagggacaatggagacctcaggggtcctgctctccacggctttcccagctctcccaagtggctggcccatcagagactctccaataaacccac

SEQ ID NO: 392 - DNA, 116 bp, Homo sapiens
gggcgacggcaggactgcgagtcccccgcacccctcccggcccagatcccagcccctgcccagcagattcctgcgggccgtatcttggcagcgcggcagcccctgacccggccctc

SEQ ID NO: 393 - DNA, 413 bp, Homo sapiens
ggggagggccattgtggctttccctcctgctctctttttaagcccaaataatatttgtactttgaggggagggtgcaaaaaagggatcaagatatgaagcaaggcagaacccaaaaagcgagggggagaaaaaagctcaaggagagagaccagctctggtccgagaaagggcctacatcacaggtttcaaaagcatcttttttcagtttcacgagccacaacccccttgatgaaaactagttgcgaaattcagcgcctgttaggcctcagctaattagaaaaaatgggctttttttcttttcctttctttctttagcaccttttctttcaagcatttagtctcaggagggggatccaggctcttggccgggctgttttgaaaacacgcctttgaatgcgtctccctaattcac

SEQ ID NO: 394 - DNA, 902 bp, Homo sapiens
gtggatctgggtttggaaacgccgcctggatcgctggctgggctcctgcagccgccaaggaggggctggctggaggtggggctcggcgtgcatagcggccacgtgactgcgccccggccacgcccaccgtccctcacgtggtcccaggccacgctgggcttcggcatgtgctaaagtggatagaaaagggagtggggcccgggcgtggctttgtggtttgggaagatatgaactccttggggtttttttctcttttaattctttaattttgatatttggaaatgcgtaaaaggtttttcatttgtccttgaccacgtggtccaaacctcaatttccctagcagaacgcggtttcgatcactggtggatccgtctcacagcaccagtcatgctgcctcgctgggaagtggagggctcaggattcccgtggttcacgatccattttatgttggaaggaaatcattttgaactatctcagtacacaccctagtgtatctttaaacctaattgagtgttgatggaaaatctgcggtccgagaaccgtaagaaaagggggctcccacctcccgctctggggtcgccacttgcctcgcaggcaggaggaggctcccagagtagatacaacttgcccgtcacccggatgggttggtagtgcacatatgcacggggcgcagtttaaaatgaaagtaaaagatgcaaatgtgtttgcaaaagaaaaattaacataggatacgtgcgggcgttctcagttgaactcggtcttactgttccacgcgagcaccccatgactcagagcccaaatctcagcggaacagcccaggacgctcctgccgtccacaggaagacgcctctgtctctgtcccccgccgccaccacacagatgcacgtactctcttcacttcc

SEQ ID NO: 395 - DNA, 464 bp, Homo sapiens
ggctgtcaggaacacttcattttggaagccagtataatttatgagatgcaaatggatttagcactaaaaaagaaaaaaaaaatcttggaaaaggtacaaagtgcacctcacaccctgtgtcgaggcgtgtttggggctctgttaatcatctcagacaaaagagatttaatctcaggctagctgatcctgagagtgccagcatctctccccaagcccaggaggcttgcccgggaagatgcaggcctggcctctgtgcaggctccggggctccggtgcacggcacttgtgttcagctcttgtctgagtcacgcagtagatgaaattacggaggttcctgcacatgatgaatcagaaagcaggatcaagccaaatatttggacaagccttgcctcgcatagagcaggatgaagacttcacagccagcaagcagcctgccagcagcaagcccagagactgtttctgac

SEQ ID NO: 396 - DNA, 80 bp, Homo sapiens
ggctcactgcaagctccgcctcccgggttcacgccattctcctgcctcagcctcccgagtagctgggaccacaggcgccc

SEQ ID NO: 397 - DNA, 539 bp, Homo sapiens
gctcctaacggactttgcaaggcccagtacacgggggctgccgcgagcggggagcgcgactgggccccaggacaccatctgtgcgagcacggggactctgggccttgacctgcgcggggacacgggccctctctcggccttgacctccgcggggacacgggccctctctcggccttgacctgcgcggggtcacgggccctctctcggcctaggtctgcgcggggacacgggccctctctcggcctcgacctgggcctgcgcggggacgaggaccctcggccggggtctgggcggcacctgcggggggcgcggtcgggcagccccacacaccgcggtgagcagggcccgatgccctcttccctccacctgccgtccccgcacccgccccgggccccgcacctgcctcctcctccgtcctgggccgaggcgggtccgcgaggccgggcggggggtccccgcagcggtgcatcccgggacactgcccctccagcccgggtcgagggatgcccgggtgcgggccgagagagcgcccaacgacc

SEQ ID NO: 398 - DNA, 434 bp, Homo sapiens
gagggtgctgtgctctccggcctgagcctcaggaaggaagggcagtagtcagggatgccagggaaggacagtggagtaggctttgtggggaacttcacggttccattgttgagatgatttgctggagacacacagatgaggacatcaaatacatccctggatcaggccctggggcctgagtccggaagagaggtctgtatggacacacccatcaatgggagcaccaggacacagatggaggctaatgtcatgttgtagacaggatgggtgctgagctgccacacccacattattagaaaataacagcacaggcttggggtggaggcgggacacaagactagccagaaggagaaagaaaggtgaaaagctgttggtgcaaggaagctcttggtatttccaatggcttgggcacaggctgtgagggtgcctgggac

SEQ ID NO: 399 - DNA, 205 bp, Homo sapiens
gattgccgggtccggctgggacgcgcgtgtgagtgcgtatgcgtttgtgtgtgcgtgtggctgctgtccaggggtgtcttttgctctgtgtacacacaccaggtgggtgccagctatcctccgggtccccaaggggtcagcagctgctgagacagccccttggacaagcccctgacccgggagcccccggtccctgctgggaggc

SEQ ID NO: 400 - DNA, 273 bp, Homo sapiens
gtacataccaggctgcatcctaggtgggggcgcccaggcagcaacagcagcctctgggggcacagggccaagctccccaaacagtccctgcagaagctgggccacccccggggaagcgtgggccaggccctcggtgggtgctggcagggccaggggcctgtgagcaggtcactctgccttccccagtgtcacagggaaccgcccggcctgcctggggtggcccagacctctgcaggggttgtcggggagaggtgggccctgtccctctcaggc

SEQ ID NO: 401 - DNA, 792 bp, Homo sapiens
gttctgccgctgaagactcggagtcgcctggcaagacggagcgagaaggggagggtggctggcatggggactctgtctgctgcctcgcaccgcaccttggaggacgctccggccaaggctgggaggggcgagtgcggctgcaggcgcgcggtggcgagggagggtgaggatctgaccgggaggcgaggagggaggctctggcaagacgcaacgctttggcgccactgccggccatccccttgccacccaccatcgcccgccaggccctcacacctacctggtcctggcgacagccggtgtgtgaaaagcctgtttcctcccctagaaaaagcacgtttggctccgctctccactgacacgtttttagctgagtgacgatggaagccgctggcttttaacagacggtcttaacgagcctctgctccccggcgaccagcagacgcgggctgacccacggttttacacaccacgtctgcgtggcggcggccgggcggccccacggggcccgggcaggaggtgacggcagcgtttctcgccgcctttgctcagcgcgcctctcatcccctctctcctgtcgactcgcggcttcctgcagaccctcggcctgtctgcggcccctcgcccgcagcctccccagcagccgaggtttcctatagcattaaaagcaggaaagaaccagccctgctccccaggaactgaacttctgtggctcatcttcagagaagccactgttgagtggggctcctcgggggtgctccagctgcgggtgagtgacatgagccagacctcccc

SEQ ID NO: 402 - DNA, 233 bp, Homo sapiens
ggggaccctcagggccccagcggggcatcagggtgttcgggaggcggcgccggctgtgagtggggccctgggccggcggcggcgggggcgccggttttctcggcattaagcctggctccgctctgccggctgtggaattcctggtctgatccgtctccagattggccctggaagaaattgggggagaatcgatttgtgccacgttctagcagcacggcctcatcatgacagac

SEQ ID NO: 403 - DNA, 102 bp, Homo sapiens
gcacccccgaaccgaccaccgatcgaccggcaccgctgttgcctcgtaagccatagcgcatgcgcgctctcaggataaacaggccctgcctgggacccacac

SEQ ID NO: 404 - DNA, 248 bp, Homo sapiens
ggtccggcgcgagaggaggcagagggcgcgccaggccgcgggagaggaggccatgggcgcgcgcggggcgctgctgctggcgctgctgctggctcgggctggactcgggaagccgggtgagctcggggcgctacaggcgggaccgggggcagcgaggaggccgggaggtggaggccgcgagggtcacttcttgtgtcctgcagagtcgcaggaggaggagctgttgtcaggtagggcgcccaggacgc

SEQ ID NO: 405 - DNA, 348 bp, Homo sapiens
gcccgccgcggcctcccaaagtgctgggattacaggtgtgagccaccgcgccgacctgctctggtctttattattcttatttttctttaccttgctcagttcccttgttttcccctatcgtcgtctccttccttccttcctaaggctggctacatctccctgtctccaacctggcttagccaccttaattagcaccaattattttgttcttacttcagatgggtctttttttccctagtttttgttattccttaagtcttgacttaactgtcaggtcgatctctgagagcagatcatgatttatttattgaaggaggagtcctctccttactcagggtcagtgaagcc

SEQ ID NO: 406 - DNA, 205 bp, Homo sapiens
gcatctttcccgagggcaggtacacttcgaagggcctgcactccttctgccccggggcgccccccgccagcccctgcagcctccccgcggagctggcgtttctgcgcagccggacctcggcctggcccccctctagcgccctgcaggggccggggcttctcccgcccggcagggccgggctccgggtccgaggcttgccctgcgc

SEQ ID NO: 407 - DNA, 190 bp, Homo sapiens
ggagatcacctagcgatatgcagtggatatggccaggcacatggccaaaccccaccactggatctccaccgttcaccacagtccacttgccccaggaatgcgcaggcgctaccggaagcgggcaccggaagtggctcggctcgtggcttccggttcctcaccagtgtgccgctgtagcgcaagtcatctc

SEQ ID NO: 408 - DNA, 814 bp, Homo sapiens
gattccctccgaacccccccttaaaaacctacgccgactgctcctcctcttggcccggcctcgaaaggggcccacttaccgctccgcggttaataacaggcctcgcgctccctgacaggagctgcagaaagcgacgcccgaccgagacgcgacgaagaacgccacggccactgcaaaactcccacgctctcatgctcctttacgcaggagctgcgggaaaagccgccggaagcgacccgccctcagccctctccgccatcctgccctttgattggtcgaagttctcccgaaggggaagtccttcttttgtgttgaccaattgaacaccttaaccgaggacctgtagccactgggcagctgcgagaggtagttttcctccttttctctaagcaaccatttccgcttccgctggcggggtctcctccgtgagctccgggcctgtttgcctgctgaagtagagtcttagggtgaccccagggggacgtaatgtttccgagaagaaggacagaaagaagactgggagacaccggaactcgaaagaaaatcggtaacaaaatgtgggttcggccaacagtgccctgtaggcctgaaatttcggtctggccagagcaaggtgattgagagggcgggggttcgggcctagcctgggcttgagctgtcctttgtgtcttgagcggatggtggggccgtggaacatgaaggagtatctttgtgtacgttcacaacgttcacatcggtgtaggccaggttgctggactctgactcaaagtgttatagaggcattacgtattgtacccgcagctgcagcctaagc

SEQ ID NO: 409 - DNA, 273 bp, Homo sapiens
gatgtgggtggtatcacctgccccccttacagaacaggaaatggagattaggagctttgctcaggggcacctggaaccaggacttgaacccaggttcctcctattcatagctgcaacttgaccttctgtaggtgctcggccttgtggaggcagagagaggcgtcctgggaacctggcgttgctatccggagccctttcagggagaattactttgggatagctgagagcttttgagaatggaatcccccgccctccatggtgctggccgagggc

SEQ ID NO: 410 - DNA, 181 bp, Homo sapiens
gtggccatccaccgggagaggggatgaaaagggagcggccggatgggtgcgggtgaagcgcccagggctaggatgcaaacccagcgagggagctggagacaatttttcctgtggcttctgcttgtgatgcaggaggagggggtgcgatgagctcagagacagctgggcaggatgcgatgcc

SEQ ID NO: 411 - DNA, 58 bp, Homo sapiens
ggcccagaccgcggcgcccaccccggcccccgccgcaaccgccgcagcagccgccatc

SEQ ID NO: 412 - DNA, 601 bp, Homo sapiens
gtgaacattaaataaaaataaatactgtacatagttacaacctcagaaatgatcttctctttgatttcttcctccaggcttacaaaggctgagacatatccctctatactcaaccctactaaaccacaagtcttctgaactgcaagttaccgtagatacgagtgcaacctatgtcacgtgacggcagtgaactgagcaaatttagctaattcgttttgaatgcttactttatgccaagcatacgaaattcctgcaacgctgccaagggaggtatcatgatccccattttatagatcagataactgatactctcagagaataatttgctcaaaaacacagggctaatcaggaatggagccaggagcagtaagcaagtttgtaagttgccagaaactagtcctttaaccgatatcctggtgttaatcaaaagtatgaacttactgaatcagaatctctgggcaagggtccaaggaatctacattgttatgaaacacccttgggggattcttacgtacgctgaaccggagagactttacatgatacctaaactctaccatgtgtaatgcaagactgaaaaagcttccaaactgacaaagaatac

SEQ ID NO: 413 - DNA, 461 bp, Homo sapiens
tcatcatcaccacccccaccatcaccatcatcaccgtcaacatcaccaccaccaccaccatcatcaccatcaacatcatcaccaccaccaccatcaacatcatcatcaccactgccaccatcaccatcaccatcaacatcatcaccaccgccaccatcaccatcatcaccgtcatcatcaccacccccaccatcaccatcatcaccatcaacatcatcaccaccaccaccatcatcaccatcaacatcatcaccaccaccaccatcatcaccatcaacatcaccaccaccaccatcaacatcatcatcaccaccgccaccatcaccatcatcaccatcaacatcgtcaccaccgccaccatcaccatcatcaccgtcaacatcgtcaccaccgccaccatcaccatcatcaccgtcaacatcgtcaccaccgccaccatcaccatcatcaccgtcaacatc

SEQ ID NO: 414 - DNA, 336 bp, Homo sapiens
gggcgtgttttcccaggcccatgcttctgctcatttcctggctgcggccttcactgactttgctgcttcctaactctgtgaccttggccttgtcacttgctgtctctgggtctcaggccaatgggtctcaggccagtggggctccccggacaaagttccagggttttggggactgcatttcaagggtcagcaaccacagtccttaaacacgtggattttggagtgacaatgcctaggttatggttctgtgaccaccagcaagtgctctagcctttttgtgcctcagtcttctcatcagtaaaatgggaatgttaatggcacctacctcatagggtc

SEQ ID NO: 415 - DNA, 189 bp, Homo sapiens
gagcctggtggtgtcttcctctggccgccgcgtggagtgctcggagcagaaggcgccgccggccggggaggacccgcgccagttcgacaaggcggtggcggtggtggcgcaccagcagctctccgagggcgagcactactgggaggtggatgttggcgacaagccgcgctgggcgctgggcgtgatcgc

SEQ ID NO: 416 - DNA, 75 bp, Homo sapiens
ggggtgagcgcggcggtcctggggcggcgggcctgtgaacaggtgggcagggtaggggagcccccggatccgccc

SEQ ID NO: 417 - DNA, 92 bp, Homo sapiens
gcagactctgtgaaaggccgattcaccatctccagggacaacgccaagaactcactgtatctgcaaatgaacagcctgagagccgaggacac

SEQ ID NO: 418 - DNA, 304 bp, Homo sapiens
gggtcctccggctgccgcatcagcgagtgcaggagggaggagaagcctccaagggggtgacgcaggctcaaggatgcaactcggccaggagtgaactggggccccgagggagatgtccagtctggtgctggagcccagctctggtccctgatccccttacctgcacggtccgtatctcctgctgggtgaggtccttggacacagtgcacttggtgcgcagcccgcgcaggctgccaagagagatgccgatgagcttctgaagctgcccgcactgctgcagcacccggctggctgcggcccctgc

SEQ ID NO: 419 - DNA, 285 bp, Homo sapiens
gcccaggctggagtgcagtggcgggatctcagttcactgcaagctccgcctcccgggttcatgccattctcctgcctcagcctcccgagtagcctggagtaccagcgcccgccaccagcccgactaattttttttttttgtattttcagtagagacggggtttcaccatgttagccaggatgatctcgatctcctgacttcatgatccgcccgcctcggcctcccaaagtgctgggattacaggcttgagccaccgcgccctgccaggaagcccatcgtttgaac

SEQ ID NO: 420 - DNA, 141 bp, Homo sapiens
cttaccgccaatcgcaaggcggctccgcgggcgcagccaatggggaagaggagcccttccctgctcctcctgactctcccgcttcctgcaatcccgtttatcttcctacttggagctcacccactgcagccagggccaacc

SEQ ID NO: 421 - DNA, 71 bp, Homo sapiens
gcgccatgttcccgccgtgctgcgcaccgcccaggtgaccctcgctgcccgctaaccgcgcgcgcgccccc

SEQ ID NO: 422 - DNA, 1715 bp, Homo sapiens
gagatcaatgcacacaccacagagtggtttctcagatagcttccttctagtttttaccctgggatatacaccttttcatgtgtgccttaatgaactcccaaatgtccattcacagaatggataaaaacagtgtttccaaactgctgaatcaagataaatgtttatctctgtaagatgaatgcacacatcacaaagcagtttctcagaaaacgtctttctaatttttatctgaagatatattcttttttcatcacagaactcaatgcacccccaaatatcccttctcagagtctacaaaaacagtgttaccaaactgctgaatcaaaacaaaggtttaactctgtgagatgagtgtacacatcacaaagtggtttctcagatagcttgcttctcagcttcatcttggaatattcccttttttgccattgacttccatgagctcccaaatgtccttttgcacagtggacaaaaactgtgtttccaaacagctgaatcaaaagcaaagtttaactctgtgagatgaattcacacatcacaaagcagtttctcagaaagtttccttctaatttttatctgaaggtattttctttttcaccattggcctcaataagatacaaaatatccctttgcagattctacaaaaacagtgtttcctaactgctgaataaaaagaaacgtttaaatctgtgagttgaatgcacacatcacaaagtggttcctcagatagcttcattctagtttttctcctgggatactcgctttttcacctttggcctcaaagagctcccaaatgttcattcacaaaaaggacaaagacagtgtttccaaactgctgaatcaaaagaaaggtttaaatctgtgagacgtatgcacacatcacaaagtggtggatgtcatagcttccttatagtttttatcctgggatattctctttttcaacattggcatcaataaactgctgaatcaaaagaaaggtttaactctgtgagatgaaggcatacatcacaaagtattttctaagaaagcttctttccagtttttagatgaagatattttctttttcacccttcacagattctacaaaaaacaatgtttcctaactgctgaatgaaaagaaaggtttaaatctgcgagatgaatgcacacatcacaaagccatttttcagataggttccttcaatttttatcctgggatatttgctttttcaccattggcctcaaagagctccaaaatgtccattcacagaatggacaaaaacagtgttcccacactgctgagtgaaaaggaatgtttaactctgtgagatgaatgcagaaatcacaaagcagtttctcagaaaacttctctctagtttttatatgaagatatattcttttttcaccataggactaaaagcattcccagatatcccttcgtagaatccacaaaaacagtgattccaaactgctgaattaaaagaaagtgttaattctgcgaaatgaaagcccacatcaaaaaggggcttctcagacagcttccttctagttttcatttgagatattcactttttcacctttggcctcagtgagctcccaaaagtccttttgcagaatggacaaaaatactgtttccaaactgctgaatcaaagaaatgttttaactcggtgagatgaatgcccatatcacaaatcagtttcttaaacagcttccctctagtttttatcctgagatattc

SEQ ID NO: 423 - DNA, 73 bp, Homo sapiens
gggggcaaaaagccgcggcggcggaggtagaaagccgcaaaaagccgcggcggcggggacaaaaagccgcggc

SEQ ID NO: 424 - DNA, 397 bp, Homo sapiens
gtgacatacaccagatggctctccaagaatctctccagttctcagggtccctaaggtactggacagagctaggaaagcaaacccatttgcttcttcctgcaggaaaccatttgaggtcaagaccccacaatcagacaaggatggagtgcctcaccctcagtcaacaggccagactcaaggtgatataatgtcttaaccaagggtgtgggactccaggtttgaatctgaactcagttctcctttgataaccacactttgttaattttccttaacaggggttcctggcaagtcatttctccctcaggccttcggtttcctcacctacaagatgagaaggctgcaccagatggaaattcgaggcgtaaggggatgtccgcgcgcagcccaccccgcccac

SEQ ID NO: 425 - DNA, 48 bp, Homo sapiens
gcaccgcccaggcgaccctcgctgcccgctaaccacgcgcgcgccccc

SEQ ID NO: 426 - DNA, 116 bp, Homo sapiens
gcgcgatctcatgcatgtcccagccagcccagcagctggggggtgcagggccacgtccagtctgggacgctgcaggggcttcgctcctgggtcccacctcctgtgcatcccagggc

SEQ ID NO: 427 - DNA, 129 bp, Homo sapiens
gatgagccctcacagccatgaccctcagcctcatcctgcagtgcagcagctgccatcctgtccaggcccgccccctgccccgccctgggactgttaccttattctctcccggagtccaggtgccccagc

SEQ ID NO: 428 - DNA, 122 bp, Homo sapiens
gtggggctgggccggctgttcgcccctgggcagccctggcggctgttctctgtgtgtggggcaagagggggccttgcaagaagggcggcgagggatccaaaacaatttttccgtggcaaggc

SEQ ID NO: 429 - DNA, 145 bp, Homo sapiens
gtggaatccggaatcatggttcactcggcttgagtgtgactcctgtgtggatgggagtatctgcctcgcgctctgttgtaggctcagcgtggggaggctcacatgtcatctgtgaaccatgtggatgaaaaacggacaacaattc

SEQ ID NO: 430 - DNA, 57 bp, Homo sapiens
gacaggcctgagccgcggggatttcagcctttaaaagcgcgggccctgacacttttc

SEQ ID NO: 431 - DNA, 71 bp, Homo sapiens
ggtcactgttattgaaagtcgaggtgacacgggagggaggtctcgccgacttcacggagcctggggcaacc

SEQ ID NO: 432 - DNA, 59 bp, Homo sapiens
gcgtttgcgtggcacggggttgggatgcctggccatgggaagcatcccaagtggggggc

SEQ ID NO: 433 - DNA, 363 bp, Homo sapiens
gaggagggaggatagcttcagatttctaaaggagggtattatccattcatgaaggtccaacaccatgaacaaacacctcgcagtaagccccgcctgctacattggggatcaaattttaacatgagattggaaggggcaagcattcaaaccatagcaagagttaaatttcctttttaaaaaaatcactgatatgattccatttcgccatagataaaagctagtatttcagcctaccattgagtgtgcttatagctcaccaaaagggcactctgtctcgggaatatagatttgcctagaggtatcctagtgcattcaaagaaagagcaatgagggatagaaaaggttagtgatggagacaccagc

SEQ ID NO: 434 - DNA, 71 bp, Homo sapiens
gacattatatggttttttgctcccactgctttttacccccgcctccgcggctttttgcccccgccgccgcg

SEQ ID NO: 435 - DNA, 194 bp, Homo sapiens
ggtgcccgcctcgcgggacatgctaggagttgcagtttcttcactggttcccaacggtggatggcggagctgcaggatgacaacacagattgagacaggagaggacgcgggggcgcatccctagagggaggggcagggtggtgtaagcggcttcacttgcaaagctttgctggccattgattccatgccaaacc

SEQ ID NO: 436 - DNA, 1325 bp, Homo sapiens
gagagtttgagttagtgcctccaaccaaacaccctaagacttagttcatcctgaacacacaggagctgaagttgccaccaaaccaagctctgctctgttctccaaagtccaggatctctaaggccctggctgccaaagagctcccagtttccttgccaggggaaacggtgttgctgccatctctttttaccttcaaagagtctaattttaccagatctagctgtgctgtttctgtctttgagcttagtttattcagaattcttctcctcatttggctttgatcctagcacaacatggagtttaggtgactcaactcttccaggcacagagtcccataatctgtctctgacaagtatttgtggatcagtctttcaagtgaagttcttctgccactgtcatgagtgaatacatttctcaaagtgtcctcgggaatgtaagccatttcccatttccaatttcaaaataaaaccccaccaaagaccatacttcagtatccctgattccaaacctccttccagcctccataggaacagcccaaggccataccctgcctttgcatgtgctcctcactggaatgggaggaaggggtcttgcctttttctttgaataatctcttcacctgagcccttttctgtaaaggagatctgttggaaagaaggctggtcagtggggcactggatggaggagcagtggggaatcagggtcttcatttccttttcccgtgttcaagctcaagtgaaacatgctctgtcttacacgtccagattcagactatgtgttatcctgctggcctgccttttatatgcccgtcagctggccatgtcttactgttattggctgaatagttttctttttcctgctactcattagggcctcaattagaaaagtttcatgccatatagttttactagggacctaaacaaagttaaggggagacattttctgggtcttatcatagtgtccaaaaaaaaaaaccctaaaaaacaaaacaaaacaaaaaaacaaagccggggcacaggaatcagaagataagggaatcatttattctaatttctgtcccaattcctacctggtagtaattaagttactgcttatttttcaagatgcagaattaaacatacttatattgaaatgtgtcatatattttgcaaagaaagaaaattttacataatgttaaaatcatgtacatggatattataatttctcaaatgcttggaaatgtcaaattaaaattatggttgattgtattagatacaaacatatattataaaataaaaatatagagaaaagtaaataccaaataaaatggccctttctaccttaac

SEQ ID NO: 437 - DNA, 1046 bp, Homo sapiens
gcctcctcctctgtgtcagtccaaactagtgggccatttcctccactagtggagtataggggcttgccaatttccatgaaacctgatatccgtagacaacactatcccatggccaccaggaattcacatacctgtctcttggtggtgggaatggggatccacaggatggtttcctttcaggcactggcgagtgccctttttctcttgtctatcacataccccaggtaggaaatcctggggagacaaagctgggccttcttagctgagacccggtacctgagttcctggggaaggcaaagcaggtccctagtatgttgcaggcagctgtcagtagtttcagtagctagtaaaaggtcatccacatactggagaagagtgcagttagggtgactggcatggaacggtatgagatcttgttggagggcttctctacaaagtgtgggggaatttttaaaaccctggggtaaccgagcccaggttaattaggtggtgtctcccaagccaggatctgtccattcaaaagcaaagataggttggcttttgggggccagaggaatagcaaagagggcatcctttaagtcaaggacagtgtatactgtatgttctggcaggagcaggctgagtaaagtataagggctagggacagtcggatggacagtaactgtccacttgttaacttcctgcaagtcctgtactgcctggtaatcatttgttatgggtttctggactggcaaaaatggagtattccaggtggactgacatggtgtgagtataccagcttgtaacagtcactgaatatggagattgatcccctctcagcccactgactcacaggatattgttttacctggaatggcagggcagtggccaggagttctacaactaccagtggatgatgctttgctagtcctgggggtttgactcagaccaaactcaaggaaagagagtctgtagatccaataggagaggattagcttcattcttcagcagttgtgagggtgaaacaaagagatattcctccaacagaggggtagtaaacaggagtc

SEQ ID NO: 438 - DNA, 861 bp, Homo sapiens
gtgccactgtctccgtgggtctacagctgccacctcctccctgcccctcatcctgtcaagggcctggggtagacagaacacaacccacacactgctcagagcctttgggacatacctagagccactagtttaacataaaaacccaataaggctgaagtgagagtcagttggctactaaactggagaaatgtgtggaagagtgaggactgtctcagggcctttgtatatctctgaaggttttgttggagtggctgaactgatgtcccatcagtactgaggatattaataataacaccaaagatattaataataataccaatagtaattcatgccagctacccagcgtgtgccagggcttgcattcatttcacaagtgtgacttgcactgcactgaggactgacctcacccagaccagatgcagcaggtctccttctaggtcacacaggtgccatgctccaaagccctaccaacctcatcaccacgcttgcatttctacagcatcatgccttttcccatttgggaatttccgtgccctgggtcttggtgtcagtgctaaaatgacccagagggaggagtgtgtcagtacttctgagaatggccaggcaccaccaagtttcctgacccatgctcttaggaaaatgctagatcacttgaatgttctctgaaagcctgttctcccattctttcctatctcagtaaggagccccaccacatctctggaaattctcctgacttgactaacttgtacagtagtcttgaagacccttttccctttcatgcaacaaatcaacaggttctatagtctcgtgctcaaacatatccccaatccacctgcttcattctgattccacatcaccccg

SEQ ID NO: 439 - DNA, 2700 bp, Homo sapiens
gctgtcagatattaggacttaggttaaagatacagtaaccaaggtcacgttagtgcagtaatagacacaaggataaagaaaaaaatacaaagtccaactcagacccacaaactcagatgtcttgtgtatagtgaaagagacccagttgggcaatgaggaaaatagtcctctcagtaaatgccctccagggtcaactggctgtttacatgagaaagaaacaaatcttgatttctgcctcacactgtaaataaaaatgaattccaagcaaattttaaattcaaatgtgaaagtttaaatatataattctagtagataacaagggaacatttttatagtttgggaacaggtaaagatttcttaggatgcaacaaacactaaacataaaagcaaaaatttataaattggactttattaaaattaaaaacttgtcttcatcaaaggatatctttaagaaagtaaaaatgtgataatactgtgggaaaatatttgctctagattaaagtgacaaaagccttaatctaagatatgtcactaactcccataaactaataagaaaaaaagagaatacactggaaaaaatggttaagagatttctctaagcatttcataaaaaataaccaaatgtctaacaagtaaattaaaaggtgctgcacattcttagtcatcaggaaaatgcaaattaaaataacaatgtattatttttatgcaatgactttaaaaaaagacaacatcaaatgttgataaagatgtagagtgactgtaactatcatatgcttctatgtgtgtaaacttttatgaacactttcaaaaacaatttggtagtctctcctaaagacaaatgtacatatacataaactttataatccaacaattcaacttttaggtatatatccaatataaattcctgcatctgttcaccatgcagaagaatgttcacagcagtatcatgtggtgtttcttaaaactggaaccaacccaagtgtacatcaataatagaaagaataaataaaatgtgagaatatgaattccaggccattcctttcttcctctattgtctggttggcctatctcaatgttgtgttctttagaaaattgttggccttttccaggcaaaacttcagtatttcctcatggatctgctccctctgtccaagagtttatggaggtgaacctcctggatttggtggtatccccaaaacaagaggaagcagatacaagccacagagtttcagtggtatacaaagaccctgcaactggaactaagatccaggtgcccaggcaggcccaggactttcttttctaaaacagggacaccaaatctgctactgccctcactctttttccttaggcttctgggctcttctgcagggaatattctttcctgcctcataatggcacctgcacattgctcttcttctcaccactgatgctcaaaatcagttgctgaatatgcccccacccatttcatagacggtgttgcctcccatggtggcagagtgcctgacagattcattccatacctatccaccccacatctgtctctcatgcacactttcttacagacgtatttcattccagggagtcatcaaacagctggaaccttgcatgggtagacttctgctgcttctctgtgatctgatgaccagcgtgagactcaagcttctatgtgtacaagttttgtgccttaaggttttacatttgcatctagaattggatttaagttaatttttgtttctggtgtgaaatatggatcaatgtctcttttacttcaaccagagaaagccgatttaaaaaaaaaataaaattgtctcttgtttttgcgtctggatcctggctgggttcacaggccactatgctgagccctaagggcagatgactgtctggttgtgacccatctctcatccccctcagggcttccccagcagatggggcctgcacctgtttctccaggctgtgcttgtcctgatgcttctctgttcttttttgagtctccagcttcttcagcaacagcttgctctggtgtgcctcccacagccacagagcctcctggaagtagttgaagaggtctgatatctgccacactattcactttgtcacaacattaaagcatttctgcagtggcaggacccagagaaggggccttgaaggctgacctgcccagggttagaattctttacttgttagccagtggaggctccacatctcagggactggccaccactacctgggcaccttccctcaaacatcaggtgttgaaaagactgtagagcaactggagccatcatattcttctctgtgtgtaaactgttatgaacactttcacaaacactttggtggtatctcctaaagatgaacatacataaactttataatccaacaattctactcttaggtgtatacctcaaagtcagcttctgggtcccaccttggcttatgttgctccctctggggtagtgtttctggccttcccaaggacacatccttggtatgactgcccccaaaatcccatctctggacacatacaatgttgcactgatgtcgttggtaggaatatggagtttgggatctagaagaaagaaggatcaacaatagaagccagttggggctctcacatggaccatactgacctctttctgagtcatctctcctcctttttttctttctcatttaagcctttgggaagaaatctcttccttttcg

SEQ ID NO: 440 - DNA, 42 bp, Homo sapiens
gcctgcagagcctgccgcgtccgccacgcccagagcgtaccc

SEQ ID NO: 441 - DNA, 1821 bp, Homo sapiens
gtgagccacctcacatggcctgcatcatttttaaagagtaaaaatttgaaaaaaaaaaggctgctactgataacatcactaacagcagcacaggtttttgtttttgctttttttttaaaaggtgtcttgctttcccaccaaggctggagtgcactggtgcagtcttctctccccacagccttgactttctgggctcaaatgatcctcccacctcagcctcctgactagcttggactgcacaggcacatgccaccaatgccaccatgcttagctaattttttttgtttgtttagtttagaggtgggtctcactattttaagaattaaagaaaggagagaaacacgaagggtgactcaatagttaataagtttattttaaacctcggagtgatggttggctgaattgggtcagaggcacactgtcttacagactaagcatttttaaggattcagggtgggagaatttatcagaggcttggacttcttctgtgtctctttgttgtgcttatctgggcaggagaattgtgtgtctgttcccacacatctttctgcagctgcaggcatatcccttgagtctgcctttagcttctctctcttagtgcaccagaagggaaagaatgtgcctattaaggcccactgttttactggggccccattgtatgaggtgaagtttggcagttacccaagagacttcctccctgccttccactgtggctgagctgtcttatctatgttttactattagctcttttctggctgcctgtagttagaagagaagtgattttcttgaaatgcatgaagctggaaaggcagctgaaacttaaagtgacagtgtttgtctgagatgacggtgctcctgctttgtcagctatgttattcaggctggtcttgaactcctgagctcaagcaatcttcctgcctttgcctctcacagtgctgggattacaggtgtgagccactgtgcctggcttcttaaatagatgtgatagttactttttttctttttgagatgaaatctcactctgtcacccagactggagagcagtggtgcaatctcagctcactgcaacctctgcctcccaggttcaagtgattcttctgcctcagctgagtagccgggactacagtcaactgcctccatgcctgatgaatttttgtatttttagtagagacgaggtttcaccctattggccaggctggtctcaaacttctgaccttgtgatctgcccacctcagccttccaaagtgttgggattacaggtgtgagccaccacacctggccaatatttacttttatgtgtccatattaaaggttacacagatagccaagaaagcattatttctgatgtgtctgtgagggtgctttggaaagacattagtgtttgaatcagtgaactgagtaaagatgtggacagtcaaatgtggacaggcaccagctaacccactgaggatgcatataaaggcagaagaaggatgaatttactctctcatgaatgtggcacatccactttttcagccattggacagtggagtcccatgtttgcagggcgttagccttggactgaaagttgtaccataggctcccctgtttctcaggcctttgaagtcagactgaatttcactactgggttttctggttttccagcttgcagatgaaacatcatgagactttataatcatataagacaattactatagtaaatccccttttacatgtctgtatatatctaattgattctatttctctggaaaatcctaacacaatacagtttctttctagagtgtttttaggttaccagaaaaatcgagcagaaggtatagc

SEQ ID NO: 442 - DNA, 270 bp, Homo sapiens
gctcagatgtctctatccttagactgccttgcgttggcaagaaatctttcctgttagaatgcctggggtaagccagaagtctctttcattagaatgcctgcagtcgcccaggtgtctctatcattagactgcctggggtcagcaaggagtctctcccattagaatgactgtggtcgctcacttgtctctatcattgcactacctggggttggctaggagtctctcccattagaatgccttgggtcacccaagagtctgtataattagacc

SEQ ID NO: 443 - DNA, 333 bp, Homo sapiens
gtgccctaccaattgttcctcaggctcttacttcaaagcacacttgcccagagctgcccttaccgcaaatatctgggtgtaacccgacgcccgctgctggcctctggtgctgggaccgcgcagtgctggagtggggcacagagtccccatccatcagccactgtgactgtgccaactccgtgtttactctgcctagagatggatgctgcccaaacgcccggagcgctgggaatgaggtgggctggctggccaggatgatttctctggaagaactcaggcaggagcgataagcctggcatttccgcttatctctgaccctgtccaggccccagc

SEQ ID NO: 444 - DNA, 328 bp, Homo sapiens
ggagacctcgcaggcccccggaactgtcgcccttccaggatgtggctccctgctcttgtcctggccactctcgctgcttccgcggcttggggtgagtccttctgaagtcaaatatgcggggcactttttgaaatccttgttctgggccgaactgggcgcagatgcgtagaaaggcaaagacacaaaaggtccggctccgtggcggggcgcgacctccgtacttggaattggacttggagcagctgagcccagccagcctggcccgcgcggagacacagggagggtgaacatgctgagaccgccctgcactgcttgccccaagaaggcc

SEQ ID NO: 445 - DNA, 838 bp, Homo sapiens
gacattgcatcattatcttcctgggcactgacaaatacccctgtgacatggaaagggctgagattattgtgcctctgacagttggggaaattgaggctcagagcagggggagtgacgtgcccaaggttaccaggaagtggcagaagcagaattgccacccacatctaatggcatgtaccaccctgtttctctagataagggtagattttccatcaaagagagccctagctttttaccggcaatttttcacactacaaacatgcggtgagcagtttgtctcaagaacaaatgaattctgcctgcaaccagcgggcctagacaatgaattggcaaattcattcatcaaggctccagcaaaacttgtttgtttaaaaatgaggccattactggctgcttatctaatcagaggcaatgggtttaaattgtgcatgttgatattaattgcccaagatttgcatttctagctggagatcccccaggagaacacaaacatgataattcaccagacgcctctgacacgcgccagctcggcactgtcccccatgttatttgagtccataattcatgatgtgacagcccacaggaaggctgagggtgctgtgaaaatgaactatctttttctttctaacaaaataactatgtataggacctttgctgattgctactagctgtctctgtttggaaacattgagctagcttctggggcatttccagattagggaaatttgtcctcattttctgatgatgtatgcttccctgtaactgagattgagcaatcagcctggagcaagtgacccacataagacctcttcatcctcttttttggagtggtcaagcc

SEQ ID NO: 446 - DNA, 731 bp, Homo sapiens
ggagaggcagtcactttgtgaggttgggtgggggaccacagtctgggaagccagaaagttgcagtagaccagagggagggtgctgtggagtctttggctccctctggggccccaagaacaaaggagcatattttggaagagaacccccagatctgggtatgcaagagctggaaagagacattcagaaaaagatgatatagacaagcagagagggagagacaggcagacatggggcagatggacaggacccatagggatcatcttctcccagcacctgctctgagccaccttttgggtgcttcccccagagccagagtcccctgcctccagctcttcttgctagtcatgcccaccagctctgagcacccagtgtcctgtgtagcctgctccatgggcctgctcccccaaagcagccaccccatcacccaggcagagctggattgtccagtcgaggaagggaaggacagaggacagaggtgccggcatgcagcagtgttcacagggcttcaaaaataacccagaggggccgggccacgattctgagtcatccattggggacacggctctgtcggcacctgctgctgttttctcaggaaaacttaagaagccaaaaagggggagaagcaccagccggcagtagctctaaaaataggctgcatctcaggatgttccccagggagatgctgagcctctcggctgcagatggatcctctgggaggcaggtggtgggc

SEQ ID NO: 447 - DNA, 228 bp, Homo sapiens
gatgatactgctgcctgccgaggaggaggcaacgctgggtgccagacccgacaaggtgaggcttgctgatggggggtggtgaaggcgcttctgggacccagggcgcggactgtctccaactcgagcatctctgtccctagcggcggcccctggagcggggagaaacagaactggctccatcctttgaacagcgggtacaagtaatgctgcagaggataggcgtcagcc

SEQ ID NO: 448 - DNA, 495 bp, Homo sapiens
gctcgtcggggaggctctggcggcacaggagcccacggcgtggctggggaggctcaggcatggcgggctgcaggtccggagccctgccccgcggggaggcagttaaagccgggcgagaaatcgagcgcagcgccagtgggccggcactgctgggggacccagcacaccctctgcagccgctggtcggggtgttaagcccctcattgcccggggctggtagggtcggccggctactccgagtgcggacccgccaagcccacacccacccggaactcgtactggcccgcaagcaccgcgcacagccccggttcccacccacgcctctccctccacacctccctgcaagctgagggagccggctccggccttggccagcccaaaaaggggctcccgcagtgcagcggtgggctgaagggctcctcaagtgccgccaaagcgggagcccaggcagaggaggcgcggagagcgaacgagggctgtgaggactaccagcac

SEQ ID NO: 449 - DNA, 64 bp, Homo sapiens
gcgatctctgctcactgcaagctccgctttccgggttcacgccattctcctgcctcagcctcac

SEQ ID NO: 450 - DNA, 244 bp, Homo sapiens
gagtccctgtggtccacccaggggacccccgtgactgatttagcccatgttggttcttggcccctacggacctcagaggaagcatgagcacgtgtcacccgtcctccttcccatcctctccagtaaaaggggatgtcaggtcagagaaattcacagcaaataacccaggcacctttctgtccccaacagctacggatgtttgacttgaacggggatggcaaattgggcctctcagagatgtccc

SEQ ID NO: 451 - DNA, 278 bp, Homo sapiens
gcttttgagagtgaaaagaagtgctattaataattactctgggataatagatacaaactgggctgttccggggaaatgccgaggtatcttcaaggaaactgtagggtcaggcaccgatcaaatgcatccactgggctgaaagcctcaggcagaaggagctctgtctgtgtgactcttgtgccttggatagtgcttggtctacagtgaatgtgtaaatccacagttgtcctgggtgtgccttctgaacagaaaatggcggggggggcggggtggggggc

SEQ ID NO: 452 - DNA, 539 bp, Homo sapiens
gcaagccaggtaaatatgtcattggagaggttggttttgtttgcatttctggtgaagttgagttgtttttatcccctacaaggtcatctagacatttttatccccaaggtcaggagatctttctgccagaggtcagcattccatccagctcctgcctgctctctgggtggccgactgtgccagtagaaatgccagctgcagccaaaggacaggctttccatccgagaaaagcactcacactcgcatttcttttctggttctgttcctcccctacataaccagaaaaagctcgttaacacatgatggcaaccaggctccaatatctgccagttcccctgtacagattcctctttagcattctctcggcttccctcctcaacaattaattcagatgagcagttgggagagtgcaggatccagttcaaaaggatctgtccccccgtgaaccccaggacagggtgagaggccacctgcacactttttttttgtcagctcacaccctgttggccctttgcaaatatttgtctttcctcatgcac

SEQ ID NO: 453 - DNA, 722 bp, Homo sapiens
gagctggcacttgaacgaagacaaagcttattgagattgggcagggaagttgtcactgtgtgatttgggagtctttcatttggccaatataactccattagattttggaagtgaacccaggtagcagggagggttctggaagtaacattctccaaccagcttgtaattaaaatggaaccctttgaagaactggtcctctctcaattgctccagcctctctctgtcagattgaatgccaggaagccgctgccttaagctttggctagttttctgccaaggcgtttaactctcagttttgtgttgcttgtattagtgctaagggcataactgggtgcagaatctggtacatcattgcatctgtcattgtgtctgtctttagctcttcctaataaccacagctctgaaacatgaaggagctgttttgcaagctgtatctttcacacccgcccccactcactccgcaacttgcccccttccttctgtgatttttttttttttaacccatgtttcacttcccacattctggttcttgttcttcctggagaacgggaccaggcaagaaacaccagggcacattaggttaaaggaaaccttatttccccctctctgctagaaaagtcagagctctcagagttgagtgatcttcaaaacccagttccttataagaagggggctgccagtgagtgactgagaaatggatggtaataatccgactctagacc

SEQ ID NO: 454 - DNA, 1047 bp, Homo sapiens
ggtggaagagggtaaataatctggtaattgatctgggatttgtggatttttacctcaaatttctgcatacggttgaaggtcgtaagctatacaaacctctattgatcagagttctttgtttaaatggaacctactgtatttatttgtgttgctcttccaaagtcaaacaaaaagggcactgatctagctaaaccccggcatggcaccgtggacatgtggtccattcactcggtgtacagatgttttcaatctgcacactttgtctttcatatccatgtgagatgaaacagccttcatttagcccgggagacacgccagcaagagaagatacatacttaacccttcacagacacatttccctgctccctttggacactgagatgtgattctggggaagcagagtgtttccctagagattcaacctggtgctctcagtgttgctctgtccctagttgctctgggtatccagaaaatagtaataataataataaataatcccttccactcccgtctttgccccccagcctctacctccctatctttggcagttcttcaaagctgtagacctcttgtgaaagagatttaaggtggggaatggtattctcggctgtctctgggcatttcaaacaatcctgcatagatgatgacagagatttactaagggtcggtttggccagtgcctgggtccttagaatgcaggcgagttgctattactaggcccctttcctagggtggactttactctctcccatttctgtttctttaacagcaacttagccagggtttctcaaccttggcactcttgacatttgggggaggatagttctttgtggtatgtgtgtgtgctggggccaggggctgacctatgtgttgaaggatgtggagcagcatctctggcctctacaaactagacatcaggagcactgcccacctgagttatgatgaccaaaactccctgggttgagaacccagtttcccccagtttagaacccttgccttttagggattgcttgtggtattataaagatcatgagcttcagagcagac

SEQ ID NO: 455 - DNA, 329 bp, Homo sapiens
ggatcccacagatcgcgggagggcgggggccgggctcgcttacagcactcctgacagctaattagcgacgcgtagtgattagaggcttccagaagaaggaagctcacgcttggagagtgcgggagggaagagggttgtagcttcaaagagtgtggtcagaataggcctccctgagatcatcatcatcatgatgttagcatcatgcttgtttagcaaagatcatcaaaccttttttttttggcttgttagaaatacacagcctattaatttacaatttttagggcagggattgtgacgctggagtgtgcatcagaggcccccagagagcc

SEQ ID NO: 456 - DNA, 393 bp, Homo sapiens
gtgaccctgacattgtaccacttgcatgagaggcagtgtttcgatggggatggagggaaattccagggccccattgggtgaggcgggactgggagttttcctgggcgacgtcttctgcatctcgcttgcttcctggccttgcggcagggggcgcgcgtggcaccagtgtgagcctccacccccctctgcctgctccagggtccctggtgagctctgccgccacctccactccaccctgtttctgagccctcttgggcctcgacactcctgtgactgcagctgctgaagggacacccgttctttgtcctgggaggcccagtggagcccccaccttcccccgccacccagaacaaatcacatggcccatcggacctgttcctctgcttggtgtcc

SEQ ID NO: 457 - DNA, 164 bp, Homo sapiens
ggccgacattaatcacatcctgcctggcactccccagcagctctgacacatgtggccgcaccccacttctggaaagctccccgctcaggctctgcagagcgtttctcgcgacacttcccgtgctggatccgtgccgccagcatggattccttcagcctggctcc

SEQ ID NO: 458 - DNA, 173 bp, Homo sapiens
gtgttggaaaatgtatgtaaagtaaaataaacacggctctcgctgggagggctccggcatccagggttctggcggggcggggggatgcggtcagccaaagcatttgaggaagcggctgtgactcacggggcctgagctgcagaggagctggctgccgagatgcaggacacgcc

SEQ ID NO: 459 - DNA, 153 bp, Homo sapiens
ggacagcacagaattcacagaggctttgcgttctcctccagccgcctgtgcgggagaaatgggagcaagccccggtctcctgataccagagcagccgccgcccagcagacatgacaccggcacccccaagccgtcgggaagcctcgccaacac

SEQ ID NO: 460 - DNA, 193 bp, Homo sapiens
ggcgtggagggagaacggctgcacatttgctgctgcagagtgtgccatcccactgggcgctgtgcctaggccagggcgacagggaggagatggggtttagaggagggaaaagaagctgggacaaacataaaagaatacttgccaccgagccggtgcttcccgaggcctcgaagacactgtgtgggagcccttc

SEQ ID NO: 461 - DNA, 118 bp, Homo sapiens
gcgaaaaaaggggcgtccaagatggacgccatgaggggctacgcggccaaagtggaggagctgacgaagaaggaagtggggggcgtggagcgcgaacaaaggggcgtgcaagatggac

SEQ ID NO: 462 - DNA, 89 bp, Homo sapiens
ggagagccagcggcctgggcaccgcggcctgtgagcaagagctgcctgcccactggcgggctccgaccactccgggaccaggaacctac

SEQ ID NO: 463 - DNA, 238 bp, Homo sapiens
gctccctgtgatatccccatccccgggacagggccaggcacccaggtagtgctcagcaattatttgtggattgaatgagccggttcactatcaagcactcggatgaagccatctacaaagataaagaaacagccaaggaaggaagaaagcggtgctgctggggaggggaggagtaaccaggaaaagtcacgaagggaaggggggcctggaaggatgactagaagctcagctggccttc

SEQ ID NO: 464 - DNA, 921 bp, Homo sapiens
ggccccatatactggcttaaaacctcaagatactagaggatctcaccagtgggaggtgccagagcagctgaaacatgtccctgtaaacaataaatgtttatctgggcagataacctggcagacagccttattctcatcttaggcaactcgaaactccacaacaggagactgagcacagaggggccccttcctctttgccacatgggtaggaagcagagatggaggtggtcctggctcctaccacatgaggggtggcagaaagccactctctgtaaatgccagcttcttccctgctggatgatggccagattcccttaaacacagagggtggggacagagaagtcaagtgaagcaacgctagacaatgctgccgcataacgctggctgctccaccgcagccctgaaggtatgaggaaaccctggcgtgttggcggctgcctcaggaaccgcgctggctaagggcttccccaggcctgggtgggaggcttgtcactgactctggccacacacataggcttggtcgccacctcggtcagtggcaaacagctgctgagaggggaggggaggagtagacccaggggtgctgtgtgctgcacagccaaatcttccacttctggagactccaaacgatattcctaagagccatatggcttaaaccccatggaggtaccaggaaaaaggcagtacgacggaaagaggcagctggaaggaaggaatggaagtgtgttaacggcacagaaactcctttcattgacaattaactgcaaacaattttattaccagttctgaaaccccaatccctaactgatgaattaaatcttggcaatggttattcctcccacctatacacttctgcccacactcttcttggaaggagagaggacagggaagtgaaacccacagtatgccaaaagggaagtc

SEQ ID NO: 465 - DNA, 98 bp, Homo sapiens
ggggaggcgggaagggatcaggcccccccgtgcccccgcggccccgcccccgccccgccacgcccccgccccgcccccgcccccgccacgcccccgcc

SEQ ID NO: 466 - DNA, 105 bp, Homo sapiens
gtcacggtccccaggctgctggccggcctgctccacccgggccaggccatatccttccaggcgtgctttgccgagatgtacttcttcgtggctctgggcatcacc

SEQ ID NO: 467 - DNA, 166 bp, Homo sapiens
gattgcaggaaaaaacaggtgaaatttcttgcggtggagttgtagagggaacctgcctggtcctggctgcgttctcaccttctcttttccgcaggacacacctcactgaggctccactgaccgccgggttacacctgctccttcctggacgctcactcccttgctc

SEQ ID NO: 468 - DNA, 368 bp, Homo sapiens
ggagccggctccctcagcttgtggggaggtgtagagggagaggcgcgggcgggaactggggctgcgcgcggcgcttgcgggccagcgcgaattccgggtgggcgtgggctcggcgggccccgcacgctgagcggccggcccacgccgccagcccccggcagtgaggggcttagcacctgggccagcagctgctgtgctcaatttctcgccgggccttagggccttcccacggggcagggctcgggacctgcagcccgccgtgcctgagcttccccctccccccgcccgccccgacctccgtgggctcctgcgctgccggagcctccccgacgagcgccgccccctgctccaaggcgcccagtcccatc

SEQ ID NO: 469 - DNA, 134 bp, Homo sapiens
gggtgctaagcccctcattgcccggggcctgcagggtcggccggctgctccgagtgcagggcccgccaagcccacgcccacccggaactccagctggcccgcaagcgccgcgcgcagcccgggttcccgctcgc

SEQ ID NO: 470 - DNA, 122 bp, Homo sapiens
gagcgtgaagccgagcgtgaagccggcgcctccagttagcagagacacgttttcctacatgggagacttcgtcgtcgtctacgctgatggctgctgctccagtaatgggcgtagaaagccac

SEQ ID NO: 471 - DNA, 272 bp, Homo sapiens
ggagcaaggggagaggagagcaaggtggggctggggaggtcagcggtggggcctctggggcctgggtaaacagttttctgctttacgtggaaggcgtcaggaagccatggggagaggggttaagcaggggagttgcatagtttgaacaatatatgaagaatggatttgtgggggcaagagtggaaggaaggagccctagggaggaggctattgtgtcacagagaggaaagactgagacccgggtgatacgggggtggggaacagccatagcc

SEQ ID NO: 472 - DNA, 154 bp, Homo sapiens
gccctcaccgtgcttgctctcgctgccgacgctatttttccaccagctgtaggagaagcccgaagaccactggtcccccgggtagcccaagtaccactggtcctcctggctcctgacgctacgggtcttcctcgtggcgtagactgccagcttc

SEQ ID NO: 473 - DNA, 181 bp, Homo sapiens
ggccgggcctgcaccgggaggctgagcggcgccccaccagggatccgagatgccctcgggagccaatctgtgttcttggcggaccacaccccgctgtctgtagccaataaaaccttggatcgtgcatcccacccccaccaaagggagattggctgaagccaaggacccgggcgcggtctac

SEQ ID NO: 474 - DNA, 396 bp, Homo sapiens
gcgggtaaggccaagccacgcgggtaaggccaagccaatccgttacacaccagtgcgcctgcgcacctttgacgtcactgaacctgtgccttcactgcatctgcagctccagcctcccagaaaaagactccttggtctgcaggtggtgctgcagctccagtgccaacctgggccggctggtcctccctcggaggtttgggggtggcggcgcccagcctgcctgtcatgagtgctgcttcacagcgccgccggtgcacctgctcctaggcttgctcggttcaggggtatgggccagttccgcccccggcttggccactgcagcgaagttgccctagggtcggcgctgccaggacgcaagcggagtctgatggctgggtcagagcggcctgtcagccc

SEQ ID NO: 475 - DNA, 74 bp, Homo sapiens
ggcccggctgttccaggaggactgcgaagggtagcatgggcccgtccgtggccacgcgtgggtcatggtcatcc

SEQ ID NO: 476 - DNA, 291 bp, Homo sapiens
gcatcccctcaggtgatcgaggccttcacagacccaaagcggaaccgccgcgaaaacgatcgacagccggccacaggacccagggaaagacgcagaaagaggctcaccaaagaccgaccgacatgcaagaaatcgctttctgacgcacagggcacattcgtccaaacacacacgcacaagggcacacacacacacatagaaaccgacacagagagggaaagaaatagagagtgacagacagcgagagagaagagaatggcgcacacacacacacgcacacggtcatacagc

SEQ ID NO: 477 - DNA, 321 bp, Homo sapiens
gcggataggctgtacgccgggcaggagcctttgcgggggtgcacagcctcctctggaagccctggttgctgccgggtgcctgctgcgccctgcgagctccgcggttgtggagccaggcctgcactgcctgctctcggccccgcctgcggaccctctgccctttgtcttgcccgtggggcccggggcctcagctggcccggggttcctgaagttagctgacgatgggctggcctctgggactgggtcgtgggccttgtgcactggccgccacgtcaccagcgccaggcctccccgcggtgctgctggagatgcgggatgccc

SEQ ID NO: 478 - DNA, 262 bp, Homo sapiens
gtgggaagcactgtgacaggagaagccgctcgcgcctcgcgcatgcgcattggctgggcccacaggcgctgcactccaggtagccaggctgcgtctactttaaataacgccacctctgtgcggcggcaacgaggctcctgctgcagccgcggcgggggctgaatccggggtccagtttggggtggcgtggcagagggggccgcgagtgtcctgtcccagggccaaaccaccaggagtcctgtcctcaggacctccttgagcc

SEQ ID NO: 479 - DNA, 343 bp, Homo sapiens
ggagggctcctgctgtgccaagcctcagggactggtttctaagacaaccgtgggaagcactgtgacaggagaagcggctcgcgcctcgagcatgcgcattggctgggccgactggtgctgcgctcgaggcagtcaggctgcgtcccctttaattaacgccaccgctgcgcggcggcagcgaggctcctgctgcagccgcggtagcggctggatccagggtccagcatggggcggcatgggagacggggccgcgagtgtcctgtcccagggccaaacccccagaagtcctgtcctcaggagctccttgagccaacttccacccagggagagggagcttcaggac

SEQ ID NO: 480 - DNA, 202 bp, Homo sapiens
gtcccctttaattaacgccaccgctgcgcggcggcagtgagtctcctgttgcagccgcggcggcggctggatccagggtccagtttggggcggcatggcagagggggccgcgagtgtcctgtcccagggccaaacccccagaaatcctgtcctcaggagctccttgagccgacttccacccagggagagggagcttcaggac

SEQ ID NO: 481 - DNA, 43 bp, Homo sapiens
gccccggctttctcccctgccgccgcagcttgttgcccccgac

SEQ ID NO: 482 - DNA, 78 bp, Homo sapiens
gccgccgctgctttttgcggcttttcgcccccgccgccgcggctttttgcttccagccgccgcccctttttgtccccg

SEQ ID NO: 483 - DNA, 339 bp, Homo sapiens
gagacttttagggtcctgcagtggattatcgtaggcagcctttttcctgataccagaccagctctgcctgtaccattttcctctgtttaagcaggctaacagctctgacagctgggcgcccgagactgcctcgctaaagcgcatgcgctagtctcagggcgccaggcctgagctgtaaattctggctagcgtcacaatgaatgccaccgtcacctagcgacaaatccctgcggcttggcggagacagagaactttgtggaggtgcctaggcggtggactctcgcctgtcttctctgtgggatccacgggatagtcccatgatcctaggagagggcagac

SEQ ID NO: 484 - DNA, 1795 bp, Homo sapiens
gtccgttttggctttctccctgactccagaatgcaggtggagatgtagagacatgatctcaggacagctgttgagataaaaaaaattcgttgtcatttattcccaagcacagcttttttccatttgcattgaaaaagtctccattcaaactgctgtcacatataaaatctatttatatgcctgtatttttctgttgtcttggcctttgtgggcagtagtgtgttttaactgagcaaactgtccttccaaataatgaagctgaagtcagcctacctgcttgccacttttcttccccttccatttttctaacctcaggataattgtaagaatgaattaagatttgtgtttaaggccgggcacagtgtctcaggcctgtaatctcagcactttgggaggcggagatggatgtatcatttgatctcaggagttgaagaccagcctgggcaacatactgagactctgtcttgtataattaaattaaaatttaaaaaaaggagagaaaaggacctgtgtttaaaatttaaaataaggggggaaggtgtaatgcaaaatgtggactatgctagctatgattgggaaaaataatttttcatacagcattatctgttgacttgtattagcagcatactggtcataagcgttttgctttcatcaaatatgataaggtaagctactttaaagtgtggtggggctttcttctgcatggctcctggaggtgttgagtcccaatttagccaattaatttgggtttagttttgatatggataagggagactggcttcattcatgatgcacacacagttttgccaataaggaaaaaaaaagcaacctgaatgttcctactcattagatgctatctggagagctcctatcccacagccacaaaggccctggcccttaaaaagactcaatgcagcctttctgcatctcatactgtattctgcaagatgctcctgtgaaagaaagttgtgctgcatcagccatctccctcctgaagatccctgtggctgaggatttgtgttttgaaggttctcagaagtcctgcaacagttctcaaacttatttgtccaggggatcttttctttcactgaatgtagttggggagacatagccttaagccatgagcagagaaagagacaagaaactgttggctcacttacaaccaagtgttgtgtttatgttttaggtttttatgaaactgaggtgctgtttgaggtgctgaatcaaattgggtggttgaagagaggctggtatccctgtagacttagccagccatgagaggttgagttttgttgaaggaggtgttttacaaagggaaatagggtgtttcctgggcatcacattagcacttaaatacatgtatcactgaaatgaaatgaaatgaaatgatgaaatgatgacatgaaatgaaatgaaatgatgaaatgaaatgaaatgatgaaatgaaatgataaaatgatgaaatgaaatgatgagatgaaatgaaatggtgaaatgatgaaatgaaatgctgaaatgaaatgaaatgatgaaatgaaatgatgagattaaatgaaatgatgaaatgatgaaatggaatgatgaaatgaaatgatgaaatgatgaaatggtgcaatgaaatgaggaaatgaaatgaaatgctgaaatgaaatgatgatgtgaaatggtgaaaagaaacgaaatgatgaaatgatgaaatgaagaaatggtgggaaatgatgaaatgaaatgatgaaatgaagtgaaatgatgaaatgatgaaataatgaaatgagggctggagccaagactggcc

SEQ ID NO: 485 - DNA, 110 bp, Homo sapiens
gaatggaatggaatcaaatgaaatggaatcaataaaatggacgtgggacaaaacggaatcaaacggattggaatagaacggaacagaatggaatggagggtaatggactc

SEQ ID NO: 486 - DNA, 94 bp, Homo sapiens
gctacgttgcccagtctggtctcgaactcctgcaggctcaagggatcctcctgcctcagcctcctgagtagcttggactaaagacgcgtgtcac

SEQ ID NO: 487 - DNA, 37 bp, Homo sapiens
gctcggctgggggccactcgggtgcggcgcggagggc

SEQ ID NO: 488 - DNA, 209 bp, Homo sapiens
gctgccgtttggctgctgggctgtggcaaagaaagtgtccttgctctcttcgtctctgtatttccgtctctggctcttgctctcttcgtctctgtatttccgtctctggctcttgctctctttctctggctcgcattaggcaagtgctttgccctggaattaaatgaagctgtatgggggtggggaggaaaagagagggaggggacagc

SEQ ID NO: 489 - DNA, 218 bp, Homo sapiens
gcggggcggggattcggcgctgggctcttccctgttcactcgccattactgagggaatcctggttagtttcttttcctccgctgacaaatatgcttaaattcagcgggtcgccacgtctgatctgaggtcgcgggcctcgatcagaaggacttgggccccacacgagcggcgccggggagtgggtcttccgtacgccacatttcccgcgccccaccgc

SEQ ID NO: 490 - DNA, 186 bp, Homo sapiens
gagcttcccggtcctgcctccttcgcctcgccctgccctgcccgactctgaaccctgctcctcttctaactaaaagtcagtgttttatttcctccgcagtccaatgcccgcgttttaccttattcaataagaagggcttcatttatggcaagacaggacagccaggtaataagggcctctgcacac

SEQ ID NO: 491 - DNA, 197 bp, Homo sapiens
gtgtccacttcaaggtgaatgaccagggaagtcacgtgtcccaatcccgcagttccaaagcccttggggaccctactgtcagggtcgtgcacgaggaggtgaaggtcaggtgagccaatcgcctcgaagggtcttgcctcattcgggacagacatccggtttcctctggctctaccgggattctaggggctttagcc

SEQ ID NO: 492 - DNA, 153 bp, Homo sapiens
gccgaatttgcctggggcaggggaaatgcgctctggcccatgtctgcgcactcgtagttccacccctcagccccagtgtttgttatttttcgggttcagcttgcttttgccccgtctccgtcgacgcaatcgccaccagtcaatggggtggtc

SEQ ID NO: 493 - DNA, 480 bp, Homo sapiens
gcggtgcaaaataaaagcaagtttattaagaaagtaaagtggtgaaagaacagctactccacagacagagaagggcgttcctgaaactaagagaaggaacgtatccaccctaggtacaatgcttgtacacatggggagaggtgttctgttacaagggtttgtgataattaactttaattattacattttgcaagaatccctattactacctttaaagcaaaattaggaacgcctttgttctccagatatccagctatctggacactcgggtctcttcagtaaacattaatttgttcccttaaccgtaagtatctgaaagctaggaatatccttctgagaatgcaggcccgtaagtcccggcctcatttttctagccctcactcaaaatggggtcgcttcaggttccaacgtctctgacagtcatactacatatgactcagccacgtcaatggaaaaagtagactggatagtgacgtaccc

SEQ ID NO: 494 - DNA, 84 bp, Homo sapiens
gattttacagatggggaaacagaggcacggagaaagtctcagctttcccacggcccactgggaccagaacccaggtcgcaggac

SEQ ID NO: 495 - DNA, 317 bp, Homo sapiens
gggcggatcacttgaagtcaggagttcgagaccagcctggccaacatggtgaaaccccgtctctactaaaaatacaaaagtagccgggcatgatggctggcgcctgtaatcccagctactcgggaggctgaggcaggagaatcgcttgaacccggccggcggaggttgcagtgagccgagatcgcaccactgcattccagcctgggcaacagagtaacactccgtctcaaaaaaaaaggccgggcgcagtggcttacgcctgtaatcccagcctttttggaggccgaggcgggcggatcaccagaggtcaggagttc

SEQ ID NO: 496 - DNA, 250 bp, Homo sapiens
gcccactgggacctggcccccacctgctctccgcgcagccgatgcagcctctggtagtaggaatccaaaatttccacctgcacggacagcgcaggcgagagcatcattcttgtacccaaagcaacctcccactccaggtgagaaagggtggtttggtggaggcggggcgggggtggggggcgctcaggagttgtcagcctgagaactgggataaggggcttcgggaggcccagtggtgggggcacttacc

SEQ ID NO: 497 - DNA, 71 bp, Homo sapiens
ggcaggatattggtctagccgctcgcgctggctcatggcgtccaggcgcgcgcggagcttggtcagaccgc

SEQ ID NO: 498 - DNA, 361 bp, Homo sapiens
gatattgtcaggtgatgctttgtgctgagaaggatgaagcggtaggggggatggagagagtggggtgggtggggtgctatttcagattgaagggtcagcgaggtcctgcagaagagcttcaatttaaatggaagccaccactgagaacgaataggggggatttggggcatcccaggtgaggagtgggattcagaaagaagaattccttgacatcccaggctccttggtgagccagtggggacacattctgcttgtcatcaaagtgaattacaaactcatccagctcagagcctctgccagagccatctgggctgcagtggcctctttcaaagaaaagagttcgccaacaagaaagcggcac

SEQ ID NO: 499 - DNA, 425 bp, Homo sapiens
gcgatatcggcccaccacaacctccgtttcctgggttcaagcgattctcctgtctcagcctcccgagtagctgggattacaggcatgcgccaccacgcccggctaatttttgtatttttagttgagatggggtttctccatgttgttcaggctggtctcaaactcccgacctcgggtgatccgccctcctcggcctcccgaagtgctgggattacaggcgtcggcccttttccttttttttcttttgtaagttgtgaggataggaaagggaaatcagatttcaaagttcagaaaacaaaaggcattcttcttctgggtgaagtggtggcctgaacattgtccttttgtccttccacactctcactgtttaataatcttgcctttttgaactgagaaaagacaactgttatgggtggttttctccc

SEQ ID NO: 500 - DNA, 34 bp, Homo sapiens
gcagacatgcgcacgcgcgcgcacacacacacgc

SEQ ID NO: 501 - DNA, 519 bp, Homo sapiens
gcttagcagacaccatagctcaccctcccctcaggaacccagtcctccctgcaaggccagagctcccggggctcctttcctccatctcagctgctgcaagcaaacccagtgctggatggctttgacctctgagctcttggcttctggctacggcatttcattgcttgtggcctcaggctggcttctcctcaatcctgctgttcccccacttcacctgggccttaggtccctgagggccagagagatacggggaaggaagtgagtcagggaagtggcattcaggagggagctttgccaagcccgcctgtagtccccagacagggaaatggtcttgaaacactgggcaggcttccagggaggaaggacttggcagggatgaccagctgagccaccccggagtagggccagagcacccggactgtattcagtcctctccattggggcaggatccctggggagttgggggtgaaatgagacctggtatgccattgctggggtggctgggcccctccccttccc

SEQ ID NO: 502 - DNA, 193 bp, Homo sapiens
gggggaaggctcaggcatggcgggctgcaggtcccaagccttgccccgccgagaggcagctaaggccctgcgagaaatcgagcgcagcgctggtgggccggcaccgctgggggacccagcacaccctccgcagccgctggcctgggtgcttagcccctcaatgtcgggggccgctccgagtgcagggcccgcc

SEQ ID NO: 503 - DNA, 29 bp, Homo sapiens
ggcggcgcgcgcggcgggggggcgggggc

SEQ ID NO: 504 - DNA, 441 bp, Homo sapiens
gattttatgaaatacagtatcccccaccccctactcctgaataggcagatctgtaccccctccccaggggccttccaactcctgctcctccatcccccccgccaggctggacactcacagctctgtgtcctccagggccggcgggcgctccatcgcctgccgccgcctcctcacggcccccaagatcttctttcggggccccagtgggacgctgatgctgcggaggtcgaggtcagagcacagcatcaaagcctcgaggtcgatcttctcctgccgcaggagggcggcaaagtcctccatgtgcagagaggccaggaaggtctccagcgggctagtctcgggctccaggtcctcgtccaagcctaaatcgagctcatcccagggcagctcctccccacagctgcggtcctgcaggctgttggcactgcccaggctgtcatc

SEQ ID NO: 505 - DNA, 280 bp, Homo sapiens
gctcaccctgaggtgatgcattgcccttcccccaggacatcctgcgatacacaatgtcctccatgctgctgcttaggctggtgagctcctatgcctggggaggtgggatgggaaagcccagctgagtccagctcagaactaccagccttcatcaacatgctgagcttaggggcatggatatgtggagagcaggagcctcagtggtgcccttgtgtccccagtcctggctggacactcgcctggcctggaacactagtgcacacccgcggcacgccatcac

SEQ ID NO: 506 - DNA, 755 bp, Homo sapiens
gagtcccatccccaggtgtgggagaagtgctgatctgctctggttttctgtttcagctcaggtcctggttcgtcccctagcccaggaggatgctgtgggagctgcagcagcggcaagagggagaatggggggaagcagcactagagaaggtagacgcctccctctcagcccgggacctgccagtctccccttcccccaggccctgggtgtgggctcctgagcaggacctggctgggcctggcagaaagagcagacgtgctcgctgctctcggacgggcttccttccctctgagttcctgaggctcctctgagggactgctgagcctgagaaagcctaggatgagggacttgctgggtccaccaggctaattctggggcagccagcagcccaggcaagaggcaggaataagtaaggagtgaggagaccccagaagcaagggacggctgatagctcacatttactaagcaagggcttccattcattctgtaatttaatcttcagtcacccacagagcctggtaatgttattatccacaatttctaaatggggaaacacagagacaggttaaataatttgcccaacatcacctagctaggaagtggaggctcccaggctcacactggagctgcagagcccacgctcctacccaccatggcaggcggcctccccctggaacctaacagtttgcaggggttgggggtggtttgctggcctggccaactgcctgtcagcccaggagctattctgttaagcc

SEQ ID NO: 507 - DNA, 213 bp, Homo sapiens
gggttctgggaaactgtaggccccacctttggcagaaaaccatgtttttgttgctgctcgttgaagggaacattaagtggggctggggacagtttatgttgagaagagcaaattttgcctatggcactggggacattgagtggctcctgtcccgggctctggagggcttgggagacacgtctgcagctctgggcatctctcaaggtcacgggc

SEQ ID NO: 508 - DNA, 465 bp, Homo sapiens
ggagaaaccgaacgagactcccataattacatggagataagactatcaggtgtaattaaacagtatccacaggcagaccacttggctacatcctccgtctctcccctccctcctcctccttttccccaggactgcaaaataaattatcctgtgaagtcagcagaggctgagctatggaaacaattaaacagaaattaaatctaattcatttatactctgagcacaagtggataatgtaggtttttttctctctctctcctcttttcgccttggtgttagagaggactattatgggaaattaatcacgagacatggcagtgaaagtgatctatcactctttcaagcgcacagacccactatatacgatctatgacagcagctacaaatgtgcgagtgacactgtttgggagaagcgggcaggcggggatgggggcgcctcacggaagcccctgtgatggcctggcc

SEQ ID NO: 509 - DNA, 469 bp, Homo sapiens
gtccaagagtggaaagacagacctacatgtaacggagggagcgtgttcccagaaagccagaattcttagaaagcctctcattctgggctggcaggcagctccagctccaggcccccggggaggcaaaggagctcctccctccgcatgcggaacccacccggcccttccttccttaccccctgcatggcaagcatcccacaccgacggtggaaacacacgtgtgcacgcagagaaaaaccctcccggggcaggcaccaacacgcaggctgtgctcattctgggtgtgagatgacgggtggattttattttcttctctaactggttctacttgccttcctccaattttctgtgtgtgtatgtatgtgtgtgtattatacattattcgtaaaactagtaaatcacacatattctaaaagaaatgaaatgctgtgtgtccagctggtttctttcagtctctttgattggcagc

SEQ ID NO: 510 - DNA, 131 bp, Homo sapiens
gacagagggggttgagatcggggctttcccctgcgaccagctcgcagcctgacgtcggcctcgctctggggaaaccaaggcacgggcacgcgcgggcgtggcgccaacgtcctcgctgccggccccgcctc

SEQ ID NO: 511 - DNA, 92 bp, Homo sapiens
gctaagtagcgggtgtttttccttgacactaacgctaccgctagaccacggtccgcttgtcaacaggcgtcttcccagacgctggcgttacc

SEQ ID NO: 512 - DNA, 178 bp, Homo sapiens
gttccgagtgccagcgcacagtgttgagcagagcgggtaggagcgccctggcttcagggagggcccccgccccctgcatggcggtcacgctgcgctgagcgtcccctcccctctggtggcctttcgcagtggtggaggggcaggaactgactggctcttttccctgtggtggctgctc

SEQ ID NO: 513 - DNA, 89 bp, Homo sapiens
ggtggggtgggcggattcccccggagcaggcccaggcccctgcttctgagcgctcctgcagcgccgcctgctggccacagagaacccgc

SEQ ID NO: 514 - DNA, 336 bp, Homo sapiens
ggctgcccgcaaacccgcgcgtgcgcagtaggcggcccacctgctggtacctgggccggctctgggatccccgggatgcccaggaaagaatggcagttctccgctgtgtggagtctctcaccgggcctagacctagaaggcaggaatcccaggccggtcagcccggtggagggggcggggcggagacacgcccctccgtagccagccaggtgttccccgcgaaagagaggccaccgccctgccccgaaccacccgaccccgtcccaaccccgcgtcctaaagctcctccagcagagcccggtattcttcctcgctgaggggtgcttccagcgaggc

SEQ ID NO: 515 - DNA, 196 bp, Homo sapiens
ggtggctcacgcctgtcatcccagcaatttgggaggccgaggcgggcggatcacgaggtcaggagatcgagaccatcctggctaagacagtgaaaccccgtctctgctaaaaatacaaaaaattagccgggcgtggtggcgggcgcctgtagtcccagctactcgggaggctgaggcaggagaatggcgtgaaccc

SEQ ID NO: 516 - DNA, 296 bp, Homo sapiens
gagtttgctggaaggaggaatttgagtccttggggaatggaggaggggagggagaaggctggtgaaaattaatgcctcttttatttttaaaagaggaaacacatctgcttgaatcaaggcctgaagtatgcaagagatggtgtggggagggggttatttgtacagtttgtttgcaaggcagctggtgtgtgcgccgcggagatgggagctggcatgatggacagcgtgtccttgccatgtgtctgtctaggcttccccacatggccaccatgtgagccccgcagcaccacccccac

SEQ ID NO: 517 - DNA, 764 bp, Homo sapiens
gtacaaacagcttgtcggttcatattcttttctattcccaccaaagaatgagacagctccccctcccttcctgcccacacttgttagcctatggtctgacccccttcttgtttgcctgtcatgcccattttaagctgattttatctgaagaaagctggagtgggggagatccctgggtgtggaggattgcagaggcctgcccctgcccgccagccccctgcccgccagccccctgcccgtcagcccgagccctcacgccaggccacagtgggagcagaacctctacgggggtggggctgggttgggaggggcattgccgctgcttggctggtggccacagtggaggtgtctgtgatgtgctcagaccgggctcagaccagaatgcacgtctgctcagggatcatctgcccctgggccaagccctgaccctttcccattcccttgtgcatgtgggtgctgtgggaatggcctggttcgggccctggaaagcagagatcttcccagtattccctgattcccagcgagcggctggtgcaggtgtgcacggctgtcttcctagcattgcaggctctccctcctgagccagtgtctcctgtggccgctgtgtgtagacagtggaactggaagcttgggccaggatccagacacctggttccagccctggcttgcattcctcccacactcatcttcaacctgtcccctctccctgagcctctggatcgcctcctccacaaagcacaggggtcggatatatgactccttgc

SEQ ID NO: 518 - DNA, 1072 bp, Homo sapiens
gttacactgtagaatagtacaaataaaaaataaagtaattaacatgatccatggagagcttaatcaaggccaacactctgtttgcttcctgttaatttgtaactaatttgctgctactggtatacttttgatacccagctttgtacattgcaagcaaaacactggaagctcaacaaattgctctgatatcttttgtgctaaattgacccttgttgatactgttgaaaatacaaagctggattccaaatatattttctttgggaaaataaagaatattttcttattttttttggtttgggcataacaatttgatttaagaggaagggacaggaattactgcttaatattttcaaaaggcaattagtctgttaactgatcccacctctattgcataagtagcattttaacaaaaggactgagctaaagcacttgtaataataatatgttaatcatatgacctttgtatggtgtgttagaggttacaaagcacttttacgtgtattagctcatcaaaacttcacaacaaaaaaatgaggaagtagtattattattctacacttgacagataagaaaacaggctgagagcatttaaacaacttgcccccagataatccaggtattaagatgcagggccaggaattgaaccctgtgcttatatcccaaatcctgtattccttcactacactacagctgccacctaaaaattgcagaagtactacatggggctctgagaaataatcttagtgctttgggcagagcttctctcagtaactgataaaacccactcagatcccttccttcctgacaactcacagctcaaatgtcatggaaaagaaacacttcctacctctctcgcctttctcccgcccccgacaacactcttctattcaggctgtcagattcttcttgcaaagcatttgggacacaaatcaggcaggtggggggtggggggtgcggggtgcacattgccttgattctcatgacaatgacaactaaactgttacattaattgttgagggggaagaaggggtacagattattcacaaagaacagataattcccagctcacctc

SEQ ID NO: 519 - DNA, 388 bp, Homo sapiens
gggagtgggagatggggagccaggttgtgtgggtagggaaagccaagaagcaaaaggagtagtgggagagagaagggtgagatgaggctggtgagggccatggagcagctggggcgggggcaatgtgaaggagcaggttaaaagcagtcggacaccggtaggttggtgcgagcaccgccctgtcctaggtgaagctaattggtttgttatctttacccaccaaagcatttactttggttagtcgcccgatccacaaacactttcgaggagatgacattaccgaaagggaggaacatctgcatcagctcagcgtccccaaactcctggggcagatggtagatgaacaggttacagccctcgggccctgcggtgaggggagggggtgggc

SEQ ID NO: 520 - DNA, 123 bp, Homo sapiens
ggcgtgatggagccccgacccctcccagtcccccgcccccttggccgccgtggcccagcgttcctagaggtgagggtccccgcgctgcaggccggccctcaaccacgcggagcccaggctagc

SEQ ID NO: 521 - DNA, 89 bp, Homo sapiens
ggctcaggtggcggacgctggcggatgtgcgagcgaggagaacgaggtactaagagaaaagcacgaagctgtggatcatagttcccagc

SEQ ID NO: 522 - DNA, 56 bp, Homo sapiens
gccctcggtgccgactcgtgccccaccgccgcctgcagtcgccgccgtctgtggtc

SEQ ID NO: 523 - DNA, 53 bp, Homo sapiens
ggctccccccgcccgccccgcccgcccccgccccccggcccgcacagaccccc

SEQ ID NO: 524 - DNA, 592 bp, Homo sapiens
gcgcccacccggcatgggggtcacgtctgcacccttaatcgcgcgcacctgcgctgtcccaggacagggaaggcccgttacaactgggcggcctccgccacaggcgctgtctctcgtttttccaattcccttcacatctttttcttgttccctttcctcatcacccgttcatccccgggtcccgcccctccaggatggcgaaggcgagagccaacccaggatcttggaggcccgtgagcaagcgcgcaagggcagcgccggcaatcagcctagacctgcgctctcccgtttcttccgccttggggaaagtgcgccctccctgcagcagccgcctgtgtgtccggaatgggtgggttcttggtttcactgacttcgagaatgaagccgcggaccctcgcggtgagtgttacagcttttaaaagctgcattgttccttatgatgttcggatgtgttgggagcttcttccttctagcgggttcgtggtctcgctggctcaggaatgaagctgcagaccttggcggtgagtgttacagctcttaaggtggtgcgtctggagttgttcattcttcctggtgtgttcgtggtctcgcc

SEQ ID NO: 525 - DNA, 168 bp, Homo sapiens
gggcgtccatacgaccggttttctcagggagtttcaaaggaagccctgcttttgttcggatgtcctacttaattaatgcaaaagggaagatgtgctgtgttacctgcagtgaaatgctcagttctgcatttcacagataccacatatcctcaaccacgggcagtacac

SEQ ID NO: 526 - DNA, 252 bp, Homo sapiens
gaggccatcctatttgcctttgtaaatctttctcgctggcagattgttgggggaacggcgtctgggaagctgttgctgtctgtcatgccgcgggcctgaccacgtcccggtgccactgtgaggcagcgtttcccaggcctgctaagcacattgcttccaacagcaaggtcttggcgtggatcgccctgcttcgttttgttttatttccaatacattcacagttgtcatctggcctcacccacagcagactcc

SEQ ID NO: 527 - DNA, 235 bp, Homo sapiens
gcctgcagccccccgccccccggcagaccctcctgtctccgcctgcagtcccccgcccctcggcagaccctcctgtctccgcctgcagccccccgccccccggcagaccctcctgtctccgcctgcagccccccgccccccggcagaccctcctgtctccgcctgcagccccctccagcagacccccccgccttgggtttccgccaggacctaaatgcagtgtctgagttgccgc

SEQ ID NO: 528 - DNA, 163 bp, Homo sapiens
gacatctatgcagcgattttcctgctgaccctagaactcagcatcccgacctttctataaacacagctgcagagccacttggccttttccagattgtgtcgtcagaaagcgactactatctccatgtggctgttctctctgggatcgacgagtttttcagcac

SEQ ID NO: 529 - DNA, 582 bp, Homo sapiens
ggggcccgggctggggactcggccccgtctagattctgtcccggcctctgggcatcgcctctcgggagccggacccctcgatcgcccgcggcccctctcagctcccccagcacagtccgatccgcgcgcggccctgtccaggcccttcgcgatttggccgcttctccccgcgtccggccgtagctgggaacacagggaccggggcccccgggaaagggagaggacgccccaggaatgacggcgctgagcccctgcggcgggacaggctctgagcgtttgtttcatgggattggaaagaaaagaacgtttgactttccctgaacaccggctgcctgtgactcacggacctgaggccctgggaggagccgcggcccccggatcccccggagaggcctttcggggccgcggccggcagccccggccgcccccagcccccgcaacctccccccgtggccccgagaagccggagaccctccccgcgggacacgcgccccccactcagagccccccaagctccctggagaggaggaatccgccgtcatctggtcccgggaccccgcccccccgggaccccgccccccc

SEQ ID NO: 530 - DNA, 95 bp, Homo sapiens
gggatgccgccctccccgggaccccgctgctgcatctgcctctccaggctcggccattccccgggggtcccttcccggtctgtcccccacagaac

SEQ ID NO: 531 - DNA, 45 bp, Homo sapiens
ggtcggccggactcatgcgctcccccggaacccccgaccccgcgc

SEQ ID NO: 532 - DNA, 188 bp, Homo sapiens
gtagagcagctcggagccgtcgccctggctctgagcaagccgagccttcgaaggccctggaccgaggcttccctggaggtccccgggccctgccgtgcgtccgaagctcctgtccagacgcggcggcgctggggctgggctctgcctagagcccaagatgttttcaatgttcgtctttgatttaagac

SEQ ID NO: 533 - DNA, 665 bp, Homo sapiens
gcccaggctggagtgcagtggtgtgtgtgatctcggctcaccgtagcctccgcctctggggctcaagcgcttctccgggctcggcctttcaaagtgctgggactacacgcgtgtgaggcactgtgcctggccaacttgataatttcaatagcaaaacggtatcctatagaaggcttgtttcttagttggtataagttgctaagtaatcattaattcaactcgataaacctggtgggttttgtgtttcgttcgtgtcatttgtgaagcccgacaggaagagtggagccctgcgctgtgtgcgtgcgttttaaagcgtgctggaaacgtctacaatggcagcgcagccagcagccacgcggccttggccacccccgagctcacggccgcagctcggcccgggccccctggacgtccgccctgggcaggggccgccgcctccgaacgcatctctgcctccctaggacgaggcagccgagggaggagagcggccaggactgcgctgtggctggacggcggatgaggcttctttcaacaaggcgagtttcagtgagaaatgcgtgatgcttttgatgtttcaacagaatattgtttctaagattatgtatcttgcacgtttggcacttgagggggtgctcatcttttgattccgctattgaggtagaggc

SEQ ID NO: 534 - DNA, 1041 bp, Homo sapiens
ggtttgcatataattaacagtggctataaatgtgagtgcagccctgtcctgtcctcagctgctgccctgggcgcactgccttgcgggtcactgtggctgctcctgtgcttcagcgggactagaagctgccgcccacgggcagcggggaagaaatctgggcaaagccatgagccctccgaggctgagctccagtttaggggctcacctgccttgcatcgttccgagtcctgtactggactgcatcaggccgcgtctcctcagggtgagtacttgtggcctcagggtaaagggcttttctcaggacgcgaggccattgctgggagaggcagattaggctggggatccggactccgttcctagcatctgctacctcaggacggagacgaacatgctataaaatgtttaaccgtgtgataacaactctcctagaaaggaaaggggatgcccctgaggagactcggtgctccccacagaactccccagcgatcccagatgggagaagctgagctgcgcgggcgctgccctcactccgggggtgaaacgtggctgtgatttccacaggtgacagaaaccaggcagtgattcaactcgtatttgactttcacattctccagcaatgttcttcaatctgggaagggtagaaaattaaagaaaggtaaggagagttaaaaaatgagatcatttcaaagtagatgcagtcttgaagcccaaatgaattacgagatccagtttgaaagctgctgcagaagtgatttcagaatcgcgcggtggctccggaatggggaactgctgctgaaagaggtcggaaagggtggggactgaatttcgggtaagaggacgccagtggttctggagcacgcggccttcagccatgcctgcgttcacaagtacattatttcagactcactccaagtttacatctctaagcccatccaagccatggcagcgcgaacctctccctcccccagctcaaggcctctgggcccccaggacagaggacagaagagccagcccctcctggctcagggttgccgggacccc

SEQ ID NO: 535 - DNA, 502 bp, Homo sapiens
gtcagacttttgtattacaccccaaatttataatgagtctgagcatcactaggacatagttagacgccatctacagggaagagaagataatctcactttagacatttccaaattgaaagaacaaattttcgaagcatcaaaagcccatttaaatttggtgccaggaatggaggcaatcgcaggagtggctgatggcctcgcaaatcttaaccctgtcgcttgggttacgaccatcggaagttctatgattataaatctcatattaatccttgtgtgcctgttttgtctgttgttagtctgcaggtgtacccaacagctccgaagagacagcgaccatcgagaacgggccatgatgacgatggcggttttgtcgaaaagaaaagggggaaatgtggggaaaagcaagagagatcagattgttactgtgtctgtgtagaaagaagtagacatgggagactccattttgttctgtactaagaaaaattcttctgccttgagattc

SEQ ID NO: 536 - DNA, 248 bp, Homo sapiens
gcgaccgtccgggtcggtcctggtgccgagaggtagtgctgggtgtcgggagccaggccctccagctggggctgagagctttcccgggtcctgggtagacggggcatggagtctcacacctgggacttgccgggaggtgccaggcaggagacggccccactcctggcctcagtttcccctcctatgatgggtgccaaggtgctgcgttccacaagctggtccctggcagtgtctgtgaaccagcaagc

SEQ ID NO: 537 - DNA, 82 bp, Homo sapiens
gccgggcggggcggggggcgcaggggcggaggccagaggcctggggagggtggaggctgcgacggaggggcgcgtcggggcc

SEQ ID NO: 538 - DNA, 284 bp, Homo sapiens
gtcgccagggaccgggctgtgtccggtgccagggctcagccaggcctggagccaggcgggctcaaagccgtctttgtagagagctgtggcccaagaagcgtgggctcagggccagcagagggaggcagggtctgggcaccctgtgcagctgggaggggtcatgtggggtcagatggggccattgaagagcagcgtggggttgtctgtgctctgctgtgggacctcactcagctcccctaaaccctcccagcctaagactcctgccctgtaaaatcggaatggcc

SEQ ID NO: 539 - DNA, 234 bp, Homo sapiens
gtgcccagtggacagcggggacccatggaccccaggcaccccaggccccagggagaaatgcaaccactggtcccacacagagtgggttgtcccgggtggcagcatgagccatgcatcaggcgtcagaggcagagggttggcaccccacggaggagggtttgctgagcgacctcgtgacaccccctagtacacacacagcccgtgtcggccctcctggttgcagaagaacatagc

SEQ ID NO: 540 - DNA, 93 bp, Homo sapiens
gcccggaccctacttggggagacagaggcacggtcagccttgtagggggacgctggtgaccccacactgctgactgggtccccattcccactc

SEQ ID NO: 541 - DNA, 136 bp, Homo sapiens
ggcctcccaaagtgctggtattacaggcgtgagccccagcgcccggccccaaagttccgttttaccctttttcccacgctgaggctacagctgaacccagcctccagaccacctcctcattggtctatgggagcac

SEQ ID NO: 542 - DNA, 172 bp, Homo sapiens
ggcttggaggaagccttggtccccagcccggcccccatctccgcgccggcttgcactccccagggacggggagctcaccccctcccagagccctggagtggaggtttgatgcctgtcaggctggggcccggggatgggtctgggggaggcacttctgagaaaaggtggaaac

SEQ ID NO: 543 - DNA, 217 bp, Homo sapiens
gagatgccacctgcctgccccagccaggcgggagccaccgagcgtccccccctcagttcctggttcttgggggcactctggtgtcatcgatatcttagacccccccaaccccccatcacccggttgctttcactctagcatgaattcccaagtgtcttgttcagaggagacagacaatcagcctattcttgtcttgttgcccagggtggtgggggac

SEQ ID NO: 544 - DNA, 145 bp, Homo sapiens
gggggaggagggtgcccaggagaggagggtgcgcgggccgccgcacctggcaggcagggcaggcctcgccgcggtcccagccgcagtcgctgccacagcggcccacgaagggcgggtagccgctgagtaggatatacaagatgac

SEQ ID NO: 545 - DNA, 107 bp, Homo sapiens
gaaacatcttccgggagcaggtgcacctcatccagaacgccatcatcgaaagtgagcaaataaggcttcagaggagggaggtgttgcccagagcctcggagacccac

SEQ ID NO: 546 - DNA, 213 bp, Homo sapiens
gagggaatagtcagagggatcacaatctttcagctaacttattctactccgtgagtatggggccgggcctgctggggctgctctggggccacaggtactttcttgtgcaccttgctgcccgtacctgtgattgaatgtaatcgtgggaaccctgagtttcatcagagccggcgcacagtctcctgcagcccaggcgttgcctgagctcaacac

SEQ ID NO: 547 - DNA, 173 bp, Homo sapiens
gccggaacagaaaggtcagcaaagaccccagcctggcagcccacagaaggatgcccagagaacggtcggattcaccggccaccaaggacacccaaacaaaacaaagatgagcgcccctacttgccagcttggcaaagatttcacagctgcggctgggagggtggggaacgagc

SEQ ID NO: 548 - DNA, 147 bp, Homo sapiens
gggtcctcgcgcgcccacgctgccgggcctcatgtctttgaccctgcatcccacaggtatctcagggccagcctggctccctggtccactgcgtgcatcctcttggctccatcaaagcacgagcacccggtaggacatccctgcttc

SEQ ID NO: 549 - DNA, 338 bp, Homo sapiens
gcccctcacctataagccccgcccttcacctgtagccccacccacggccagcctgcgaacaccgccccattggaacataagccccacccctcacctgtgagtcccgcccactgtcccaccccgccctcaccaggcagtcgagctgggccacgggcgtcttggccccaggctggcccacgtcccacaccttcacacagcccttgccgcccgtgtacacatgctgtgtggagccgctgatggtgaccgcgcagaccacctcgccatgggccagcgtgtgcagctgccgggcgtgccgcgggatgcccgcgcctaccagtgcatccgaggggaagggaacc

SEQ ID NO: 550 - DNA, 167 bp, Homo sapiens
gtctatgctctccagctcccagtgtccccggcaccctcctccgactccccagagaaaagctgcttgtgtgacggcatcatggaagccgggtgcccggacctgcctcccaggcggccggcccagcccgcactccggtccccataaggcgattcggggccgccctcgcc

SEQ ID NO: 551 - DNA, 38 bp, Homo sapiens
gcgccggccgcggggcgggggggggggttggggggggc

SEQ ID NO: 552 - DNA, 281 bp, Homo sapiens
gccagagcttgggtggcagccacggccccagctggacaacattgtccgggcctcctgcccgcctggcatctcctccacaggcaggtcctgcgcctctatgggtcctctctgccgcgtcccactgtgccccccaccacccccactgcccggcttccctggccagaccatctgggctctggtcccagctctgctgaccggctgtgtgaccctggacaaaccactccccatctctgggtctcatccagtcaggggcagggacgagattggacagggcctgggcc

SEQ ID NO: 553 - DNA, 166 bp, Homo sapiens
gggaggggcctccgcctcctcccgccaccccccgccgcgcccggctgcccccacccggtgcccgacattggcagagagtgtcctcgggcgcttccgactggccctgcctgcttcgtgtggccactgatcccttccggagcctctccatggggacgcccgtgtgtgc

SEQ ID NO: 554 - DNA, 513 bp, Homo sapiens
gcctaatttgattctcaccagaagctgctgctgaccacgggtccctcgccgaggtctgccttctcttcgttcagcagggaaatgtccctgcatgagagggacatttaagatgctctagcaccccatgaagactttctcctcttcctctctctgcaaatcaatgatattagtgtcagtcctcccgaggagccccagggctccgggcaggaggcctcaccccagaagaaataataaggggaaccaaggtcttgagcccagagaagggcggacttaaggagctggtgttgggttcgcaaattgtcaagggctggctggggcagggagctcccctgactgggtggagacatagacactgagctgtgcctgactctagggggatagatttgagcctgcggtttatttgaatcagagccacagaaggggtagcctcaggagggggtgaggcatccaagaattggcaactttgctttttttttttttttttttttgagatggagtcttgctctgttaccc

SEQ ID NO: 555 - DNA, 256 bp, Homo sapiens
ggtgatgccagggcttggatgaagcctggagggctgacagtatccatggtacacacctcagtgggctccgaggggcatttgctctgattgattgattgatttttttcagatggagtctcgctgtgtctcccaggctggagtgcagtggtgcgatctcggcgtgagccaccgcgcccaggtttttgtttgtttgtttgtttgtttgtttttagagagggagtctcactctgtcacccaggttggagtgcagtggcac

SEQ ID NO: 556 - DNA, 920 bp, Homo sapiens
gtgcgttcttattttcccagcttgcactctctcatgcttgggccaattggaggttttctcttttcccccctgcctccgctcccctgctgtcaggttttagcggcttatctggtctgggcttagaaattagataccctttagtataaaatcagagtccataggctctgagaggattatctgagaaagggtgcaggaattttcatgcccacacatagtgagctctgtcgcgactccttgggattgtcggtttttgtgttttggcttccttctgggatcctggatcacgtttttggcagttgagggtgctgtctgaccgggctccagctgggtagaatgtgggagtgttgcatagaattttgagagtgagatctataaacacttgggtcaaatttcaagaagataaagttctgtcagacttcaaggtccatctgagggtttggcaaagcaaaaaagataccagttttaaattaagcagtaattgctctgttttggttgttggatattactgagcgggctcttgccagtcacatcaagtctgttatctctggactcacagcagagggggggcattgtaagaggcaggagattctgcagctgagcttcaggcatgggcaagactaaggaactgaattccccgccaccccaagaccacattccgtattataatctctgaacacaaagggcagccccggagagctgcggctcccatattctgcagttaaatccctcagcgtgggggagaggcacacagccttggcaggcagagtagatgctggagagacagatgctttttctgcagcatttggtgaggctgcctcgggctggcatttctgttgccacattctcagcaaagactgaacaccctggcctgatctcggtggtgaaagagctcctgccaacacgggcagccttctcacaac

SEQ ID NO: 557 - DNA, 270 bp, Homo sapiens
gtggccaaacatccctccttaccaaagggacaggagtggttcctgccacaatccctgagcttggattccggttccctggccgcccctgaatcactcaagtagcctatcacctcctcctcagcaccagggacccctcgccctcttgctaccacaaagtctgcctcctgccgcctgcagggccctgtgtgaagtgcagtgtcccccacccccccgccatgagtgcaggtgatcgttagcagttgccatcgttagcaggtgccaatttcatcc

SEQ ID NO: 558 - DNA, 231 bp, Homo sapiens
ggggtttcaccatgttggccaggctggtctcgaactcctgacctcgtgatccgcccgcctcagcctcccaaagtgctgggattataggcgtgagccatcgcacgcagcagtgagttttttttttttttttttttttttttttttttttttttttttttttttgagatggagtttcgctcttattgcccaggctggagtgcaatggcacgatctcagctcaccacaacctcc

SEQ ID NO: 559 - DNA, 549 bp, Homo sapiens
gtgtccccctctcacctacccttgcccctggctcgtcttcctaatgcagacgctgcaaaaaacccctccaacccctacatttcccagatgcctttgctgctccgtttctggatgcagaattggttctaccaatgagaaatgctcatgagagatttagaaagtggaagtgaggcagtgtgggcttgtgtgtatatcttgctgagaagcagggttgtggagctatacattttattttcatgaattcgtgttctttgttggacccatttccaggtcatagttctggtaactgcctctttgttctccacctttctccctatacaaaggagctgctccttggtgacccagctctgtggtgtcacgagggtcctacctattccggggctgctcaatctgtggtcttattcacacatctttagcatctcctgagaacttgttaaaaatgcagagtcttgagccccaccccggacctacttactgaatctgcaactgtgagggggtgagactgaagaaactgtgcgttagcaagttgttctgctgattcttttgcac

SEQ ID NO: 560 - DNA, 421 bp, Homo sapiens
gggcatgatggcaggtgcctgtaatcctagctactagggaggctgaggcaggagaattgctttaacccgtgaggcggaggttgcagtgagctgagattgcgccactgcactccagtctgggtgtcagagcgagactctgtgtcaaaagaaaaaaaaaacaaaaaaacccaaaaggctggcaatccagtgagttgtctttcaggaggaaaatgttgctggtgttgaggcagccgtgtgactgtcacgtgctccgtggcctgggcctctccgtgtcatgtgtctgcccaccacggtgcccggtgttcccggctggctctgatgtgtgctgtcagcttccagcatcggaatgtatgctgtctttgtgtacttggcctgtgggtcactggcccttttcccaaggtccttgccaccccttctcccc

SEQ ID NO: 561 - DNA, 135 bp, Homo sapiens
gtgagatataactgaagctttatctggagtgggggaatgggggtgtggtcagttggggcacccaaagacaaccatgctctcggtgaaggcgccgaggtcctggcattgtttctggttctcttcgtcttggcattc

SEQ ID NO: 562 - DNA, 347 bp, Homo sapiens
gtgttgtacgtggtcaataaatatttgagtaaatggatctgtattttcttgcataccataaattattcggattataagagggtaaatttatttcatgttatatgtgtgggattacagagccacgcagtttttactgcgtctcctttctccccctagtggagacaaatgataccacagggataacagaacggcaagtgcagtttgatgatagtaagaaaaatccctgttgtggaggtcacagctttacctacttaccttaaacacaggagttttctggccaggcgcggtggctcacgcctgtaatcccaacactttaggagaccgaggcgggtggatcacctgaggtc

SEQ ID NO: 563 - DNA, 252 bp, Homo sapiens
gctctctctccctttggctttctctctccgtctctctctggctcactgtttctctctctcgctttcttgctgtctctcgctctctctcgctctctgttccacttccccatctttgcctgccatcccccaccctaccagccacaccaggcgcagcccctctgtgaccagcctccttcccctcaatccccctgctgccctccctgccctgcctgtagggctcggggacctccagccggctggagccgagagaac

SEQ ID NO: 564 - DNA, 319 bp, Homo sapiens
gccctctgtggctcggccacccctaaagcgaggcccggcgaggcagcgcagagggtagggtccgacctgggctcctcagggccccggggcaggctctctatccccagcagtgtttacccatcttggtctgtacccctccgggccctctggcgttccaggggtgcctggaggggctgactgctctcttaacaggagggcagagggcaggggacagacgacccagaggtcccagcactgaatgagcaggcagctcccacctcctggcaggcttccttctgggacaggggcgacattgctgggaagtgctcaggaggtagcc

SEQ ID NO: 565 - DNA, 61 bp, Homo sapiens
gggggccctctgtcgggggccgtggccgggcactcggagctggccgggggagccccacctc

SEQ ID NO: 566 - DNA, 230 bp, Homo sapiens
gccatcctggagcttctggaggcagtgtcagctccggccccagtctgcgccccgtctacctcccagggagggtgagttatggggataaatattcagcacatggcgaggcaagaatggcggaaggggtgcaggggagagaaaaagagagaaaaaaagagatacaaattctcagcgccacagagacagagacaaggaaagatagaaatattaatagaaagagacccagagac

SEQ ID NO: 567 - DNA, 513 bp, Homo sapiens
gccccgcgcctgaccacagccatctctgtataaagccacaggcggcccccactctggccaccccactccacccctggctggaacactgggtgtcagtaattgctcagggagcactagcagtgtgattaattatggctgctaaatatgtaaatcagctgggggttttccgggcagccgcctgggtgctggcactaatgttgaataaacacaaggagcttagcaaggcccagaattcccttctcacacctttgtcaattaacgtttcatttatggggttgggtttctcattcattaacgagctttgggctcattaaagagtcctcattaaactctataaatcgtccctcctttccaaaacgcctgcactgggatgggaatggagttgcaaaaccgagacaggccgacctgcattcaaacgcctggctgtgtactgtgggcagacgcctcccctctctgaacctgtttccttcctgtaaaatgcaagcaaacagacatgggggcatgggggcaagc

SEQ ID NO: 568 - DNA, 219 bp, Homo sapiens
gcggggaccgagcagcgcggggtggcctggctggtgcttgggctgtactcactcgcttcacctcctgtctcccgcaggcgcctcatcccagagcagctccccagcctcgagcacgcccaactcgcctgcgtcgtcggcgtcgcaccacattcggcccagcacgctgcacggactgtcgccaaagctccatcgccagtaccgctctgcgcgatgcaagtc

SEQ ID NO: 569 - DNA, 266 bp, Homo sapiens
ggccgcgcaggggagcgtgtgtctgtgtgtgatgtgccttcatgcgtcactctatttatgttgttcgcagcccaacggtagcggccagggcaaagtcccggggtcatttttgctaccgccgccgcctccagtggccagacctgtgccccttcctatgcctgattccaaatccaccagcactgccccagacggcgccgccttgactcctccatcaccttgtaagtggacgatgaaaccgaaaccacaacgcccagcgtccccggccc

SEQ ID NO: 570 - DNA, 121 bp, Homo sapiens
gggcgtggtggtccgactcgcggccgtagggtccctcccggctcagctcggcctcctggcttcccgcccagggcctccgtgcgtccaggcccgccgagccgctggggtcccgggcccgatc

SEQ ID NO: 571 - DNA, 92 bp, Homo sapiens
gctctcagaagccccactcacctgtatcgcatcagcgctggggctcaggcgacgcggctagtggtcagcactgcgagtcctccaggggtccc

SEQ ID NO: 572 - DNA, 604 bp, Homo sapiens
ggaaaatccccgaagaggaaggggcagggggagcctatatctctctcccaccccttgactctttaaggaagggtgacactgatgagcctatggggttggctagccaacccctccactccccgggtccccttaggagagaccactggagctctcggctcccagacaaggccagcatcccccatgagcccctcccaaggccctgcccaccagcccccctgaccccccagacacttacatgggtgtggccagagaccacacctggctctgcagggccatctctgcccagaagttcactttctggtctccgagttctggacccaccacccgcttgcctgaaggtgccccggaggctgtgacttggctgcctggagtgggggggggctgcgggcgggcaccgggagagcaggtccagcgggtttgggccagggaggcggtaggcacaccagagaggggggctgggggctggagggcagttctggggaggtactatcagctgtcctgataaattattcaccagcctctggcctctttgttgcactcagctgcctcccggaaaacactttcacacacgcgtggtcaagcgtgggggtgagagtactgagtc

SEQ ID NO: 573 - DNA, 264 bp, Homo sapiens
gatgtctccccagccttgcgtgtcctggtggtagcgctgcatggagcgcatgttggctgcgcagcgcgtgaagtccgtgcagggtggtgcaggcacgtaggtgtgatgcacgtacaagaatcccagcggcagctgcagcagcttcgggcggccccgataaggcgccgctccccagcggcagcgggggtggatggccgggcatcctacaggcaagggggttgaaggctggggtcaggaactgtttctctgcctgttcctccaccc

SEQ ID NO: 574 - DNA, 1234 bp, Homo sapiens
gtgtctggattctcaacagctgcagggggtttctgctgacctctgctccttctctcttggggctgtcccaggatccgaaggtaaataccaaagcagagagggaagacaagctgtctgctcaagaggatgtgttttctcatcctggaatgatttcagtctggggattgctttatagggaaaggtccccatgggaggtggtttgggacggcagtgtggcctcaggacatatccctagggcagattcccacatccttttgtgtcctggctggtccacatgggctctggttccccccacagataaagggtctgcacactgaggacccccccattctcagcagcccccagggaagcagaggtgactctaatgtccctcaggatggcagctcccacctgggagaacccccccttatgccaggctctgtgctagtgcctcctgtgcacctgtggacatgcccatcaatcctgccatttatgagtgagcagacggaggccacgtcccccaaaggggagggcaagtccaagtaggagggcaaggtttgggagtgtcaaggacggcttctgaaaggggaagagagtggccaaattatatcccggttgagctacagggctcattgggacatctgagtggggaagagcacgtcacccctggaaggggaaggtgtgggagactgcctgcacttctcttctggcccagcagtgtccctccataggggaaggaagtcagagctaattcctgtgggaaagcagcagcccagagatgagcagacacaaggaaatgggtcaggcagggagcagcccctggatagtgggctcaggaggcctcaagtccagagtggagaaggtggggatgccaggagagccctgctctgtgccccacagtactgcaggagccccttggaggtgcactattgtaggaaagacaggcagcaaaaggatccagacaggctggggtgggaggacaggtaggtgagaaaggcttgggatggaactacagaggaatgagtgagtgaggagaggagtgagtgagtgaggagaggagtgagtgagtgaggaggggagtgagtgagtgaggaggggagtgagtgagtgaggaggggagtgagtgagtgaggaggggagtgagtgagtgaggaggggagtgagtgagtgaggaggggagtgagtgagtgaggaggggagtcagtgagtgaggaggggagtcagtgagtgaggaggggagtcagtgagtgaggac

SEQ ID NO: 575 - DNA, 354 bp, Homo sapiens
gagatccctgctacaggaagcccccgtcaccagtgccgaaaggagcagagtccccgcccttcccccacctccctttccccactcctcaccattgcgtgcctggacaacctttatttgcctgaacatttcaccccgaatgaagtcccggtcatgtccggtgtctgccagccccggtgtcactgagagacccaaagagaacgcgctggtaaaggtcttggcagagttgcgggttgggagatgtgattaagggtcggggggcggggcatctccttggacgcccactcacctttttcatcccgcacatccttcgtcatcctcaagactggggagagacgccagcagcatgttctagac

SEQ ID NO: 576 - DNA, 672 bp, Homo sapiens
gagagctgtggctgctccagcaagcaggaggcaggatggtggaatgtaggggtgaagcaggagcttgaggagagggggaaggttggatcagactcttggttggatcagacactgtgttgtgtcattgccaggaatactaaggtccctgctagggttggagaccatgcatctagaatggggtcagtgagtgacatctggtacagaatgatacaaacaaaccagctcagaagaccaaaatcatcatcagtcaatgacaatgacttttacgaggtggactctcacagtgctctggttactcctgtttttcacttggggagaggagcctcagagctgcaaagtcctttctccaaagacacacagtgagagctggggtttccaccctgggtctgatgcctccacaacttgtaaacatttcagaaaattctctctggaagccagagtggagtgtgtgcagaggagaggagataaggaggaggatggggcagcagtccaggagagaggatggagaggagtggagcagatgaagtgcttaatagaagagaggttgcccagcaatgggagggatgggggaggaaggtggctgacgctggagtatggtttctgggtagggaggctgcatggtctgaagactttccttccatgtcataagcgtggtcttttcatgtgggatac

SEQ ID NO: 577 - DNA, 16 bp, Homo sapiens
gcgcgcgcgcgcgcac

SEQ ID NO: 578 - DNA, 777 bp, Homo sapiens
gccccagtgggtgggaactcacaggcagggcccctgcaagacaggctccccagatgagggggctgctggcaagggttttgagacatgaagaggagttcactgaaagaaaactacaggccaagccacctgagccacccagacagggcagatgaaaaattggctacgtgggaggcagtttggggtcttgggcagaccctgagggctggggatagggagtgtgaaagagtatttggtgtttgttcctggttcttggttagacattgagctcaatcaccagtggccaacgatttaatcaatcacatatatgcaaatgagacagttggggctcagaacacagaaactcccctcagcctcaagttatggggccttggcctgccccgcgctttgagcagggcatcggaaagctcagaatcgagtctctccgaccttctcctgccctcctgcctctagcccctttctcccctggaaaccatagaaaccagaattcctcttccccaaggcaggtcagagacactggagcccttctccccttaaaacaaaaaaaaagccacaaagccggcaaaggtcactctctgcctgctcccttgaagaccctcattccgggagggtcctgcccataccctggaggaaggaatgctacccagagtctaggaagtctgggcaggctggcccccctcccccacccagtctgctccctttaagatctacagtgtttcaacacattgatacacattcttcatagaacctaagccgaaaaataggcagtcagccaggcac

SEQ ID NO: 579 - DNA, 935 bp, Homo sapiens
ggggtcggcgacgtcagcttcgactccgacagccagtttcccctggacgaactcaagatcgaccccctgaccctcgacggactgcacatgctcaacgaccccgacatggttctggccgacccagccaccgaggacaccttccggatggaccgcctgtgagcgggcacgccggcaccctgccgctcagccgtcccgacggcgcctccccagcccggggacggccgtgctccgtccctcgccaacggccgagcttgtgattctgagcttgcaatgccgccaagcgccccccgccagcccgcccccggttgtccacctcccgcgaagcccaatcgcgaggccgcgagccgggccgtccacccacccgcccgcccagggctgggctgggatcggaggccgtgagcctcccgcccctgcagaccctccctgcactggctccctcgcccccagccccggggcctgagccgtcccctgtaagatgcgggaagtgtcagctcccggcgtggcgggcaggctcaggggaggggcgcgcatggtccgccagggctgtgggccgtggcgcattttccgactgtttgtccagctctcactgccttccttggttcccggtcccccagcccatccgccatccccagcccgtggtcaggtagagagtgagccccacgccgccccagggaggaggcgccagagcgcggggcagacgcaaagtgaaataaacactattttgacggctgtcttttatatttctgagcacacacagagccctggcgtccaccggggcaggcgcaaagtggacagagcatgcagggcggcggacccccccacgaccctcctcgccctgtctccatcccctcgaagccctgcctcaccgcaggcaggcccatcggtggccacctttgccgggaagtgaccggaaggccccgtgaggggtcgaacgc

SEQ ID NO: 580 - DNA, 207 bp, Homo sapiens
ggcgtcaggtactgcaagctcaccacggtcacatagcagtagactcggaccacctgtgggcaggtagcaggggtggctgcagcaggaggccttctggtttgggacgactccacgcccaaaggaccaggaaccccaccctgagccccaggttccctctggcctaggtcatcggggcgtccataccctctgctggatttcacgggcttc

SEQ ID NO: 581 - DNA, 57 bp, Homo sapiens
ggcgatcagggccttgcagcgctcggacagctcgaggccttcgggatagagcacgcc

SEQ ID NO: 582 - DNA, 262 bp, Homo sapiens
ggaggcttccaaggttactcttatcgcacttggagcctccggatgctgctcctttgtcccctgggaccctggagagccagtgtcttgaggacccaaacataaaaatagctttgttctgtgaggctcctgcatggggctgcagtgccagtgatggcctctaggtggtgagagccttctgggtttttggtgcccactgagctttgctggagcagctggagcaaagaagtcacaccgaggtcatgcaccttgagttattattaac

SEQ ID NO: 583 - DNA, 172 bp, Homo sapiens
gtgaaccccagggggcggagcctgcagtgggccgagatcgcgccactgtactccagcctgggcgacagcgagactccgtctcaaaaaaaaaaaaaaaaaaaaaaaggacaaagtcttgctctgtcacccaggctggaatgcagtggtgtgatatcagctcactgcagcctcc

SEQ ID NO: 584 - DNA, 1044 bp, Homo sapiens
gctggttccctgggtccccttatttctttctctatactttgtctctgtgtctttctcttttccaagtctctccttccacctaacgagaaacacccacaggtgtggaggggcaacccacaccttcagcccagggtcctgctgtcagcgcagccaccatgctatggctgaagaggactgaggctgagttggccaaggagaactcggggcgcagactgtggagctgactgacgggagacccgagtcccaccacagccacttgccaccagttccaatcaactccttcccttttctcaggatgtcggacccggcactctcaccatttctaggcttccagggggtcctggcatcttagctgtggatctcccaatacctgcaggtcacaaagtcacggagactgggcctctgaagactagacgtagaactccagctgcagccggagacaaaggcccccatattccggaagctgtcttgcccgctccagctgcgtggctgattggagggtttccagcccagtgttgctgattggataacgcttaaatccccgcctcctcacatcgtgattgacagaagatgtgaccaaacgctaggctgaatgaagaaagagtgactgcctaagctgccgcccgctcagaaagggcttcgtccctgagctgagccaggcccaccctagagggtgtttgcatgtaatcttgtgtataaggttatatgcatttataaatattatactgtatggctattcacaaatgaaaagaatataataataatgattttgaaatttcaggttttataaccttcctggctttgagaaggcagcatgagattttttgtctttgtttttgttttttgagacggagtcgctctgttgaccaggctggagtgcagtgacgcgatctcggctgactgaaagctccgcctcccgagttcacgccattctcctgcttcagtcccctaagtagctgggactacaggcgcctgccaccatgcctggctaattttttgtatttttcgtagagacacgtttcaccgtgttagccaggatggctc

SEQ ID NO: 585 - DNA, 226 bp, Homo sapiens
ggggtcgcctcggctctaacccttggtcatggctcagcttggtgcgcagaaacccgacgtcaatcagagcattttgcgcagctgggcgagctttcctcggcatgcggggcagttcccccatcatctttatgctgccacctccgctttcatcagagagttacacaggatggtgcaggggcccggagacaccgtggaagagtccaggggagtgaggaggggctgggcc

SEQ ID NO: 586 - DNA, 463 bp, Homo sapiens
gcccctcttcctggagggcttcaggcacacctggcgcccaggaactgccgccgaccgggctgcgccctctctcaagcctgggtgtcccctccgctcagaggtcggcgcgggcgagcgtcagggaaggctgtccccgcgggcttcctgctgccgaccccgtgcgcggggcccggaggccgggtcctttagggtccccgccgcaggctaaacttcagtgctggaggtgcaggggccaccgcctcgcgcggtcggattccagcccctgctcaccctgtcctcgcctgttaacttacagcttttcttgtctcccacctccttgccgagtcccgcacatctgtaacttcagcgacgctgaagtttgcagcccgcgtgagaggcgcggccctgggggacagggcagagttaaaacgcgactcgggcctccctccccagctccactgccccgggcgtgccctgagcctgc

SEQ ID NO: 587 - DNA, 537 bp, Homo sapiens
gcagtgccactctgacactgcatacattttcctaaagcacaggaaaggaaacagaaggctccagggagccccaggacttgacctctgggattgggccattctaagggcaggctcagcagtctctctgctctccaggaaaggcgttccctctacgggagacagctctgggcttgctttgagggctccagactggattcagcatacgcgggagctgggggagggcggcttgcaaggcggtgagctccccgccactggaagctggaagctacagggaagcttccgcggaggactggcgatggcttctttgctccaacagctgctccttgtgccaggctcaggctgagttacagctagaggtgcagtggctacaagagtttctgctcacggtcatggaagagaaagaaaatgaacaaggtaagtgccatgaaaaaaaaaaaaaagaggcatgggggagaggtgggggattttgcagcttggtccccagcagagaagagccatttgctgaaaaggagtagcactgggtgcatctggagcagc

SEQ ID NO: 588 - DNA, 670 bp, Homo sapiens
gaatagccagagatcagggactggtaaacttcagcccacatcctggttttgtatgagctaagaatggtttttaattttttcaaatggttggaaaaaaatttttaaagaatttttcataacacacgaaaattacatgaaattcaaatatcagtgtccatgacgttaactctcttgtttaagtattgtttgtggctgcttttgctttgcaacagtgaagttcaatagttgccgtagagatcctggctctcaaagcccaaagtacttaacatttggccctttacagaaaaagattggagactcctgaccccaatttaccaattgctaatattctgcctcctttgttttctctctctcttgctggaatgtttgtgttcatccttaaatacttcagtgcctatttcagtttcttatactgaaagctgggaatgacagctttagtgtgggaagagataagataacataaaatgtttagcacacagtgcttggcctgtagacagaacttaataaacgatccaaaaaaaattcctggcattgagcacagaggtggttgccagaatccctaacctgaaaatgccgagccccactgcttttctgaaacccgggttcccgcagtctggaagccagcttttcctccaaaagggcttctttcctgagaagtagcaaacgcctc

SEQ ID NO: 589 - DNA, 405 bp, Homo sapiens
gtcgcaaataaaagcctcatcagattagtgagtcagaaaagacgctaatcccaacccgatgcttcatttctactttttttttccccttccaaaagcagaagctgttcctgttctttaagaaaaaaaaattaaaatcagttttctaaaagactgatttaaccacaatcaaaagtggaggggggtgtgggccgtgtcactattgctgtatgacgattagcatgaagatgagttgcactttagccgggctgaaacttgttcctaacagaatgttaaatacttagtgaaaagaaagattatgtctatctagttacaccattccttgatatatgctccatgtcagaatgccattgtctcctgggtaaagacggagagttcaaatacccactatctctcccctggtgctcc

SEQ ID NO: 590 - DNA, 271 bp, Homo sapiens
gtcctaggacctgttctggggggaaagggggaagccagggatcagccccctcaaacaagaaaaactggaattagcactgaactcagagggtttgctggggcttagcaagctgcgacctgccccaggcctcggggcacgcggcggggctctgcctcctctgttcccagggtggcggggcaggcgccgcctcctcactgggctcgtggcctctcctctgccaagggcggccgtgggtgaggaggcggccagacacaggacagagtggggggcc

SEQ ID NO: 591 - DNA, 274 bp, Homo sapiens
ggggtttcaccatgttggtcatgctgatctcgaactcctgaccccaggtgatccgccctcctcggcctcccaaagtgctgggttttcaggcgtgagccaccgtgccctgcctggctggctcttttattttatttttatttatttattagagacagggcctcactgtgtcgcccaggctgcagtgcagtggtgtgatcatagctcactgcagcctcgacctcctgggctcaagcgatcctactaccacctggacctctcaaagccctgggattac

SEQ ID NO: 592 - DNA, 120 bp, Homo sapiens
gaggcggtggtgcttgtatccgggataaccaggtagggcggctgcatgcttcatagaggccagcctgtgccgaccgggagctgtaggacggtctgtgtctggggctgcttatgggtattc

SEQ ID NO: 593 - DNA, 148 bp, Homo sapiens
ggagtcttgctctgtcgctcaggctggagtgcagtggcgcgatctcggctcactgcaacctccgcctcctttcgcctcccaggttcaggcaatttttctgcctcagcctcctgagtagctgggacttaaggcgcgtgccaccacgccc

SEQ ID NO: 594 - DNA, 115 bp, Homo sapiens
gaaagccagcgagagccctgaggttgtggtcaccaccacgtcggcgccgctcaggtgtgcgtgcaggagcgagtccagctggaaaggcagagccacgaacacgccgtcgacctgc

SEQ ID NO: 595 - DNA, 105 bp, Homo sapiens
gaaagccagcgagagccctgaggttgtggtcaccaccacgtcggcgccgctcaggtgtgcgtgcaggagcgagtccagctggaagggcagagtgacgaacacgcc

SEQ ID NO: 596 - DNA, 89 bp, Homo sapiens
ggccaccttcaccccgcgggcctccacccgcacggcgcgcgtgtagctcacagtctggctgccccgatgctcgttttccaccagcaccc

SEQ ID NO: 597 - DNA, 253 bp, Homo sapiens
ggggcttcatgatgggggcgtggttatcaggttcgaagtggggcgcccgtggaaggggcagagccagggacgtgaataaaccttgaagggatgtgattctttaaagggtctggctatgggaagagacagagcttctttagaaggattgagtcctgtgtcttggataaaacgagaggaggacagcctgatcctggacactcagggggcgtggccacgggaggcgggcttctttggaagctgcggggccgagggc

SEQ ID NO: 598 - DNA, 112 bp, Homo sapiens
gcgtaaacaacacgcagaactgcagtcgcacttacaagacttggtcccagggccgggcaccgagtggctctgcctgcgatccagcactttgggaggccgaggcgggaggatc

SEQ ID NO: 599 - DNA, 134 bp, Homo sapiens
gcctctagcctgccgccccaccatgtgggaagtgaggagcgcctctgctgggccgccctaccctctgagaagtgaggatcgcctctgcccggctgccccaccatctgggaagtgtggagcgcctctggcttgcc

SEQ ID NO: 600 - DNA, 31 bp, Homo sapiens
gaccgaccgcagccgccgccgcccgaccgcc

SEQ ID NO: 601 - DNA, 285 bp, Homo sapiens
gctattcccaccgtccctacatagcatccagcgacaccacagccaagggacaggcttggcggaacctgcgggagagaagaaccctctgagcctgattgaaaggcggtgaagagacaggagagggggatcggtgggcggtcccgcctccatcttcagttcccgcatgggggcgaggcaggtacatgggccttgcgggctgtgggtgaaattccattattaattgttttttcactaacctggtgggggagtcgggcgcgagtttcgagagagactctggcttctggc

SEQ ID NO: 602 - DNA, 31 bp, Homo sapiens
gcccgccccccccccccccccccacgcccgc

SEQ ID NO: 603 - DNA, 81 bp, Homo sapiens
gctacacttggagacaaattcaggaatcctttattagctggcgaccgagagacggctaacgctcgaaattctctcggcccc

SEQ ID NO: 604 - DNA, 63 bp, Homo sapiens
gatctcggctcacccacaacctccgcctcccgggttcaagcgattctcctgtctcagcctccc

SEQ ID NO: 605 - DNA, 156 bp, Homo sapiens
ggcgccggccgcgaggacccgggcctgtggtcgcgcctgtgccgcctggctggcgcgtcgtcgcccgcagcctacgacgaggcgctggccgagctccacgcccacggcccagccgccttcgtggactacttcgagcgcaactgggagccccgccgc

SEQ ID NO: 606 - DNA, 263 bp, Homo sapiens
ggtcctgagctcctgagtattttggacagatggattgaggcaccagactcctgggttttagtggggacggagttctggggtctaggaggtcggtggactcgcaaatacctgcttctgtccgcggtgtcgggaggccgcgctcgcccctgccgtctccaccacagctcacggtgcccagggcactgtggatgccagagggcagatgtgcctctgacactttcttccggaggaaagggttcccaaggcctgggagaaggttcagc

SEQ ID NO: 607 - DNA, 106 bp, Homo sapiens
gagacaatccagcagcccaggagggacaggtggacttaatcctcctcctcgtcgtctccagccccaccctcaccctggcccttcttggcgttcttcctcttcacgc

SEQ ID NO: 608 - DNA, 66 bp, Homo sapiens
gtgtccgatgcaggccccttccggctgttgatcttgatggcggcgcgcagcgccgacttgaccgcc

SEQ ID NO: 609 - DNA, 82 bp, Homo sapiens
ggggcgcagcgagccggccaccctggcccagccggtcaccatcagggagattgcgggtgcgtggcccctgaccctgcgctcc

SEQ ID NO: 610 - DNA, 77 bp, Homo sapiens
ggcgggggtgtcgtgggcacagcccaggctactgcggggacaggctgccagacccggcgggtccaggttgggaactc

SEQ ID NO: 611 - DNA, 126 bp, Homo sapiens
gcgagtataatctgcacatgtgccatgtcccgaggcctggggcatcatccactcatcattcagcatctgcactatgcgggcgaggccggcgccatgacgtcatgtagctgcgactatccctgcagc

SEQ ID NO: 612 - DNA, 164 bp, Homo sapiens
ggatccattgatgatgcggctgctgctgtcatccgaccgggcgtcttccccggccccagctcccaggtcctggttgctcccagagggcacggtgttagaggggtggtcacaggaaacatcattgttggcgagaacatgctctgggaacggaaaatgggttgggc

SEQ ID NO: 613 - DNA, 307 bp, Homo sapiens
gagatctctggtgaaggaggcggggccacaaggggtggagtcccgaggggaagtcccactgggcaaagttccgaggggcggagctattttgtgtaagtggttccttggggcggagccacaggctgtgctgttccaagaaggaggtgatggctgtcggtgacgtcatagagacgggctctgaagggcgtgtccctgctccgttccgagggggcgcgactgtgtcttgcttgacctcgtgagggggcggagcctcaggggcggagtcttagtgtccagaggggagtcagggcagctggaggtccagggc

SEQ ID NO: 614 - DNA, 318 bp, Homo sapiens
ggcaacatattcaagcttatgtacaaggcatttgaggtcgaggcatggaaaaatactgaggcaccgtgtgcgtgttgtttgtgcatgagattgaaactccttgaccctgaaaacagggcaaggaacggaatgtgtgataaggagcgcggaaagcagcctcctgagactgtagtctgagtgtttttaccaggccatatgtgtctcatgacccgaccgcaaaaggccatctggtggacattttggtttaacaaaccctttcgagaaacacttggcggacggattctggggcggcactctttcagagatgctgctgccgcc

SEQ ID NO: 615 - DNA, 230 bp, Homo sapiens
gtcccttagcaactgattggcctggagtctagaggactggtgggggtctggaaccagctgcccaaggaaaacgattctcccaatgtccgggggacgcagtagcaactgttgcttctgactagctcaggctctggagacccgcgcgctctcttatgcggctgcgcatcccagcagctcccgcgagaagggtcaggccctgattggctctggacaaacccgcgcgagcttgc

SEQ ID NO: 616 - DNA, 1512 bp, Homo sapiens
ggcatcaccccactcaagaggccagacggggtcccagctggggtgacacagctcctttcccagtcgggaaggggcgtctgcagggaccaggaagggcttagcttggggctgcccgctccggcaccgacctgggacgcgccctgaggcccctgcctgggaccgtcccggactacatttcccagagaccatccaggagtacgccgtgctgcatgctggaacacggggcttggggctctggtttcccccgacggccccgcgtcctcttctagcctcaccctctcccgaggccccagcgttgggggactaccgggtgcgtctgcggctttgggagagtgggaggagggaaagggatgggaggggtgcacgcacacgtgtcagtgtgtccgcgtgtcagcatctgtgcaggcgcacgtgtgtgtcgggctctgttgtgtctgcacatgcgtgtcggcatctgtgcgtgcgcacacgcccgtcagggtctgtgtgcccgcacaggcacgtcaacagctgagcacgctatgtatcgggggtctgtgtacgctcacatacgtgtcggggtctgggtacgtgcacatacgtgtaggggtctgtgtgcacatgcgtgtcgggctctgctgctgtctgcgcgctgcggccgctgggtgcgcgtgcgcatgcgcgctggcctccagggggtggcgggaccgagtgtgtgacgcacttgcgtgggagtacgaggctgacgcggcggccctgtccccgtaactgtgacacgggtgcacgcgagcgtcattgggggcgatgggggccgtgctgggtgcgcgtttgcaccagtgacgcagccgctgcatctccgccagtccgcgcaggtgagattggtgcgcgtggctccgaggggagacgggcacggggcttctgacggtgacgcacttgctggagagtgtggggtgacacagccgggctctccccataactggtgaccgggggtgctccagaggctttgggtcaacgcagcccgtgcctgtgaacctcggcggtgcgtccctgggactctgctccgtgaggtgcgctctgggggttgtgcgggggcagcggtcgggacgggtctccgtggcccacggatgcacctctgcaccgtgtggggtggtggggcccgtagcatggccgtgctgggcgttagtgggtatgaggggcgcagatgtgtctcaggacagagtgagctgtggtgaggctgagctgtgcagacttgtgctgggatgggtgatcgggccttctgggtgacgcaggtgtgtgtgacaacacaacctgtagcttcagcgtctctgtgctgggatggatgatcgggccttctgagtgatgcaggtgtgtgtgacagtgcaacttgtagctccagcgtctctgctgcttcccctgccttcacctcctaaccaagcggtacctgcctgagaacaagggccgcggagggacgtgagcgcctgagcctcgcctggaaattcaccagcaagaaggcagaaacagccatgaggtgac

SEQ ID NO: 617 - DNA, 1093 bp, Homo sapiens
gtctgcagggagcaagatggactcagtgtggggctgcctgcctggaacgcgccctgaggcccctgcctgggaccggcccagactacgtttcccagaggccccccaggaacttaaggcgctgcatgctgggacacggggcttggggctctggtttccccagacatcgccctcctcaagcctctcaccccttcccgaagcccctgtgtgtttgggcctgagtagggcattcgcttcctaggaggaacccaggggtgcgcgccaagcatgggggtagggggaccgccgagtgcgcctgtggcttcgggagaggccaaagaaggaaggagtgggaagggcgcgcacgcgtgtcagtgtgtgcatgtgtcagcgtctgtgcacgcgcacatgtgtgtcggggtctggtcgcacatgcggatcaaggtctggccacacgcatgcgttgggggtctgtgtgcgcgtacacgtgcatgtcgcggtctgggtgtacatgcgtgtcaggatctgtgtgcacgcacatgcgtgtcgggctctgctgctgcctgcgcgctccggccgctgggtgcgggaggcccctcccgagtccggggtgcgcatgcgcgctggcctccatgggtggcgggaccgactgtgtgacgcacttgcgtgggagtgcgaggctgacgcggcggctctatctcccgtaactgtgacacgggtgcacgcaagcgtcattgggggtgatgggggccgtgctcggtgcgcttctgcaccggtgacgcaaccgctgtgtctccgccagtccgcgcaggtgagattggcgcccatggctccaaggggagacgggcacggagcttctagcggtgacgcacttgctggagagggtgtggggtgacgcagccgggctctccccataactagggctggggtgctcccgaggctttggggcgacggaacccgcacctgtgaacctcggcagtgcgtccccgggactctgttctgtgaggtgcgctctgggggatatgtgggggcggcgatcaggacgggtctccgtggcccacggatgtgcctttgcactgtgtggagtggcggggccggcagcgtggccgtgctgggc

SEQ ID NO: 618 - DNA, 49 bp, Homo sapiens
gccagcgggggcgccggcgggtccgggggtggctggggcagggccaggc

SEQ ID NO: 619 - DNA, 85 bp, Homo sapiens
gggtgcggcggctcacgcctgtaaatcccagcactctgggaggccaaggtgggcaaattgctcaagcaggagaccagccagcctc

SEQ ID NO: 620 - DNA, 60 bp, Homo sapiens
gggtgcgccggccgcctggaggtctggcacgggggtcgctgggggtcggtgtgtgacgac

SEQ ID NO: 621 - DNA, 133 bp, Homo sapiens
tctatcctctctctttgtgcgtctttgtctccttctctccccgtctctctctctccaccctccctgtctctgtctcgcacttgggtctctggggtgggactccccctccctgtcccgtctctgtgggtcgccg

SEQ ID NO: 622 - DNA, 290 bp, Homo sapiens
gactaaggtttcgagccgtagccagtttttgtggatgagtgttgtgtgtgtgtgggaagccagtgattgattgattgattgattgatttgggacggagtctcgctctgtcgcccaggctggagtgcagtggcgcgatctcggctcactgcaacctccgcctccaggttcaagccattcttctgcctcatcctccctagtagctgggactacaggcgcccgccaccacgcccggctaagttttttgtatttttagtagattcggggtttcaccatgtgggctcttgacctc

SEQ ID NO: 623 - DNA, 4119 bp, Homo sapiens
gcagccctgaatttttccacctccagctgtacgattttgagtgaaaatccttcaccaacagagtctccaaatcacctagaccccaaatcttacacccacagcccacttcctccattttctcacttaaaatcccacctttccccaaatctcttaaaacgtctgagtttggccttggattccacttttctgctcactgacccaaggctgcacagctgaacccgcccgcttcccgaggcctggctttggcgccccctggaggaagtaaggcgccaccagccatgagggcacgctgcccaagatagcgggggtagggctcagctggcacgccagtgcagcccgcggtcactcaggaaggctccagtgcaggccccacccatgaaccggcaaagatggcacagaatgaatgaacacggctctacggccctgcctaccttgaaatcccctcagccccctccaacagccctgctgtcactcaagatggcgcctgcgcagtacacctctgctgcccccgccaccggccaacacacgtggtactaggatggacggggctcacgctcactcctacagcgcagctgtcattcagtaatggtgcctccgcactgcacccgccacattgaatgccggctgctctatcagacaagacacacatgctatggcccccctcagtcactcaagacaaagcagaccctccctcagaaccgcacctgcagccagcccagctgtcattcaggatggcacctgcacagtacaccgtggctgccacctaatggccagcaaagatgatgccacagagtgggcggggccatgcagaccccgtcagtcactcagtcctctgcacccggccctacagccaacccagcagtcattcaaaccagtgcctgtgtaactgccctcacgtgccccattacagccaaagattgcaccacagtggaccaggctcggcagcccctagtcactgagaaagccctccctcatgcccgcccctggggccgacccaggtgtcactcaagatggcgcctgcgcaatcaacctcgggcgccaccctgtggctagcacagacagtaccgtagaggcggtgaggggcagtggaggtgagggtgctctcagccctatcagtcccgaggaacggtcccgggccccagcccttagccccgccagcagggcgcctgcacaacccgcctcgcagctcccccactaagccgcccccatacacaagatggaaccacacgcatcctgtggtgaacaaagtcttggtcaggcaacaacaggggaaggggtgagcctctgccaccgttagccaaaaacacagcgagcgcggtgataacccgtcaccctgtccttaagcataaatggctccgcggccgctaaggcaaactctttaggcacgtctcccggctcccccagatgcggggactgagccagtcccactggcaaaacagcctggcgaccagcacacacagcccaaggagcgcggcactccacagctttccatcaccgcaaggcaggcaagcacagcaaccgtggccccgcccctccctgtggacaaccccacacctatgcggcaaaccgcagccgccccgatcaaagatggcacccaggtgggcggggcttgaacagaccgtcccgcccatgccacctgcagccacttcagccttgccccgccgcatctgccgccaaccaatccgggcaacgcctgcgcggcaaacctcagctgcccccatcaaagatggcgcccaggcgggcgggccttgtctcgcccaaccaactaggacagcgcctgcgcagcaaatctcaagcactttcattaaagatggcgcccaggtgggtggggcttgaacaaaccactaggtccaatgccaccctgtcacttcagccttgccccgccccatctgccaccaaccaaccaggacagcacctgcgcagcaaactccagcagcccccatcaaacatggcatctaggtgggcggggcctgagcagatcgtcatatccaatgctacacagtcacttcagccttgccccgccccctctgctaccaaccaaccagggcagcacctgcacagcaaacctcagcagcccccatcaaacatggcgtccaagcgggcagggcctgaacagatcgtcacatctaatgctacccagtcacttcagccttgccccgccccatatgccaccaaccaaccaggggagcacctgcgcagcaaacctcagcagcccccatcaaacatggcgtcaaagcgggcggggcctgagtggatagttacccaatcacttcagccttgccccgccccacttgccgccaatcaactagaacagcgcctactcggcaaacctcagccaccctcataaaagatggcacccaatgggtggggctggaacagaccattacatccaatgcaacccacagtcattcagctttgcctcgccccatctgccaccaatcaaccagaacagcgcctgcgcggcaaacctcagccaccctcataaaagatggcacccagtgggtggggcttgagcagacgattacgtccaatgccacccagtcacttgagccttgccccgccccatctgccgccaaccaaccaaggcagctcctgcgcagcaagcctcagccgcccttatttaagataccgcccgagagggcggggaaagaaaacccctacaggcaggacagcccttcgcccctcccaccaccactgcggcaaacaagccccgcccccagagggtagccgggcacgccggcgccgcgaggccgatggcaccccgcaggaaggggcattttcgcagcccccagacccagcccaggaggcccagggctcccgagagccgcattccgccgtggcaacagggatagcattggtgtcgaccttgctggacttgccgtggcagagcccccggctgtctgccctaatgcccccggtttgctgcggtggcccccggccagtcagaaaggcgcggagaccctgcagcagcccctcagaccccggactgcaagatggcggcaccaacgcagcagcccgggctgcgcccacccctgccccaaaaaggcaccaaccatccacagcctggccgccactgtgcccactctcggactgggcagcgggcggccaagtaccatgtccgccagcccgccctgccacaagggtcgctggcttgccgcggggtcttgggcttgcggcaagacggccactctggcccagagccgtcgcgacaccaaggtcccgcgggcaggaggcgcgcggggcggccgaaggcgcactcacctcacctcagtgctgcgcagcctcgggcacgaacagccgcctagcgcaccctcatggcgcccggcgcccggcggcgccaccagcccagggtggacatctcccgcgcctcccaaacctctcctcccgcagctgcccagacttctgcaccgaggtgcagctcgacgcctccttgtcagggcttctccgcagaggcggggcttctgtgctagccaatcagcagcctcaccgccctctccgggccccctcaccacagccctgtgacgtgccaatcaggctgcggttgccacagcaacagtttggcgcgaaggctgggggctgacgtcagggagtggccgtgagggaccccaaagccaggtctggaaaaggggggtgggttgggtggtgggggtgcagcccccaaagaaatgggggtcgaaatggaggaaaccccactgagatgctcaaatgtaaaaccgctgaagaataaagggacaaatgtacacatctgtctaaatgaaaaaaatgaaaatcctggccgcaaaaacacatacattaacgtctaaagacctgcagggaagacaagacttttccgcctgggacacatgaaagacatcgagctaatttccttaataaatgaagagctcttggaaaccaacgagataaagaccaaaccaagacagaaaaatgggcaaaagggataaaactggcaattcgcaagaaaatccaaacggctggccgacctgcgaaggaaacatcacgacctgtttgcataaagaaatgcaaacctgaaacaccgggcacgtgcggtttaggggagcgggcagtctcacacactactgagttgtttcccagcagccgtcaatacagaccttccactgc

SEQ ID NO: 624 - DNA, 344 bp, Homo sapiens
ggttttcttgccatgactgcagaatggaggccacgagcccacttccttgccccaagccctgttccctactcacacggcgcgagcgctgccccccctactcagacggcgcgagcgctgccccccctactcagacggcgcgagcgctgcccccctactcagatggcactctagaactggaatgtcccacagagcagccgcaaaccacagatggctgttaagcacttaatatgtggctgctgtgaattgagccttgccacacgatgagtttcaaagacttagtattaaaaaagaatgtaaaaaatattattacaatttttatattgattacatgttgaaatgataac

SEQ ID NO: 625 - DNA, 98 bp, Homo sapiens
gctgctcttcctgtgaacagtctttggaaaagtttttaaaccctaacatagggcgggcacggtggctcacgcctgtaatcccagcactttgggaggcc

SEQ ID NO: 626 - DNA, 91 bp, Homo sapiens
gtcagagacggatttcagaactcgagagcagcaggggcgacaaggggcttagaaaggccacaagagacccaggagaactttacagtgcggc

SEQ ID NO: 627 - DNA, 154 bp, Homo sapiens
ggaagggcttcaggccgctgtgtgtctcctggtggtggatgagctgcgagtgcgcgcggaaggccttgccgcactccctgcaagcgtagggcttctcgccgctgtggatgcgctggtgctggctgaggttggagctccaggcgaaggccttgcc

SEQ ID NO: 628 - DNA, 95 bp, Homo sapiens
gttggtgggttttccgggacaaaggcccctcctcgacgcagggttcgcttgggcgacgcgtcgactctcggctccctgcagtcaaggcgcggcgc

SEQ ID NO: 629 - DNA, 399 bp, Homo sapiens
gcacgaaggccttgccgcagtcgcggcagatgtagggcttctcgcccgagtgcaggcgctcgtgctggcgcagctcggagcagccgcggaaggtctttccgcactcggagcagccatagggccgctcgccggtgtgcgcgcgctggtgttgcaccaggcccgagcggcccttgaaggccttttcgcacagtgggcacgcgtagggcttggcgctgctgtgagtgcgctggtgccggctcaggttcgagcgctggttgaaggccttgccgcactcggggcacgcgtagggcttctcgccggtgtgcacgcgccggtgctccacgaggtgcgagaacagcccgaaggccttggcgcagtcggcgcactcgtacggcttctccccggctcccgacccccgtc

SEQ ID NO: 630 - DNA, 193 bp, Homo sapiens
gcaccgcgcccgcgcaggcgcagagaggcgcaccgcgcccgcgcaggcgcacacaggcgcaccgcgcccgcgcaggcgcacacaggcgcaccgcgcccgcgcaggcgcacacaggcgcaccgcgcccgcgcaggcgcacacaggcgcaccgcgcccgcgcaggcgcacacaggcgcaccgcgcccgcgcaggc

SEQ ID NO: 631 - DNA, 157 bp, Homo sapiens
ggggagacaggcccctcaccggcccctctgaggagcagggccaacacgccgcgggctctgccggccccgcaggcctcgggttccatcgcagcagcgtggcctgatgactccattttgtcgctgcggaggagccgcaccgagtccacagcgccagtgc

SEQ ID NO: 632 - DNA, 117 bp, Homo sapiens
ggtgaaaccccgtctctactaaaaaaaacacacacaaaaaaaattagcgaggcgttgtggccggcacctgtattcccagctactcgggaggctgaggcaggagaatggcgtgaaccc

SEQ ID NO: 633 - DNA, 173 bp, Homo sapiens
ggaggtcatgaaaccgccgtagcgcttgtccttgggcgggctgccccagcggaagtgctccatcctgtaggggccctcgtccttcttctcggccgccaccagcaggctgtgctccaggtcggcctgggcccctgcgccgtcatcggcagggccgtcggggccatctccctccc

SEQ ID NO: 634 - DNA, 213 bp, Homo sapiens
gaggggcctggagcacctgggggcgcgggcgggggacccctgctgggaggccaggagactgcccctgctgccttctgcccagtgggaccccgcacaacatccctcaccactctcccccagcacccccatctccgactgtgcctgcttgcaccagccggcaggaggccgggctctgaggacccctggggcccccatcggagccctgcaaattcc

SEQ ID NO: 635 - DNA, 168 bp, Homo sapiens
ggataagagatgcgatgtatttgtgggggttccccaccccccacgctggtcttgcttaagctctcggcaggacttcaggctctgagcagtgctggagaagaaacaacccactgacctgtttattcgccccggcccctgctttcccacaggcaaggaaatcagagcagc

SEQ ID NO: 636 - DNA, 225 bp, Homo sapiens
gtctgccagcccttctgctctggggcgccgcgctccttagccactctcagcatcagtgccagctctgccccaccacacgcccccggcaggtaccagtctctcccggccctaattcctcagcggtttctctctgcatccccgcacgcgtccctgagccgcctgcctgggtcagagaggagcgtccgctgagctcgggtgatcatgcacagattggggccagaagtc

SEQ ID NO: 637 - DNA, 170 bp, Homo sapiens
gctattagctgttggaggagcagaccgtgtaggctgacgagatctgagtaaggacgagggatgagatgtcaaggcagggaacacggctgcctttgcgaggtggctttgactcgcgctgcagacatcacacgtcagctcggtggagacagcaagcaaacccaactgcagcc

SEQ ID NO: 638 - DNA, 481 bp, Homo sapiens
gccgccgcccactccctgggcagcaccatttccgccccgagggaccctcaccgggtcagtgctgccacctcgaatccgccccttcccttccaggggccaccgaagcggaaggcggtcccgcttttctttcggggaacttttcttggttcctgcaactgggatccgcagtctagacctcgcggctcaccccatcaaccccgcacgctgcccgcagttcccccgccaccggcagaatccgcacttactgcacccacagggcgacggtgacgaagcttcgagcagcgccgaacagccccagccccagctcccgcgcgtgtcgctcggaggaggcgccgtgtacccagcgacttcggagccagcggaaccgccgcagcgtctcccgggcaaccggaacgctagggcgcgcggggcactgcggcttccggagcgggttcccctggcgctggcagccccagccctgatccttctgagaggtgacagc

SEQ ID NO: 639 - DNA, 344 bp, Homo sapiens
gcttcccatcggggcagggacaggaacaaggagcatgcttctaatcaccgaagatttatcctgcttcagacgaggcgtttaatgaaggcaggggaaggggctggaggagatgcccttcgaagcggtttaaagaaagcccgttttgtgcacgcagattgtcagaagggcaggaaattctaaatcaactgtgctcctgggcctcagtgaggggacagggggtgcatacagggagggggagggggcctgtggggtcgggggaggtctaggggcacaggccggctatcaggaagcagggccaggcagctctcctgggatgagctgtgtagtcactcaactctttggcc

SEQ ID NO: 640 - DNA, 382 bp, Homo sapiens
gtgttggggaactcggcacctgggcatccctcccccctactccttgcttacttgcctgctgcaagttctggggtagttaggcttattgtacgataaagtggcagcccaaacatgcctggaaagtgacgtctgctcacacggaagaagcagtttccaaaatgtgagactgaaaaatggctggagttgtggctgttgtctcggtggcagaagcagctgtagcagccccagcctgggaatgctggtgagggtgctggggacactctccaagtcaagggcaaaaccttctcagcgtggctttccctgccaagtacggacccgccctgcatgtggcagccttagttggaccctcgtttattattgtaatgaggatcccttttctaac

SEQ ID NO: 641 - DNA, 1574 bp, Homo sapiens
ggtgcagagaaagcagatttggggcatccagtgcccactccttctgtattgcagaaaactgtccatcagactccacagcagcctttagctttggagggcctgggccttactgggtgtcagcagcctgttgtctatctgtctatcctgctatctatcatgtatcactctctcatctcctgtgtttccatccaggtctgcacgaataccaatactctatgctttgtactttctgaccttacatataggttccctgcaggaaggacatgtgtgtttgttgtgggtgtgtagatgtgtgcaattctggatgctgggctttcaaccctcagtcaaggtctgagggcatacaaaaggatgtgtgtgtgtgatgtttggtataaatgtgtgtacagtgcattggtgtgtgtccagtatgttttcatgtatactgcatagcacaggtatttgtgtatggcttagccagtttctctgtccttagttctgcaaggagtgcatattggggggctccaatacacctacaaggtacttgggcatgtgtcttgtgggtcttgggtctagtgtagacatgtgtgtgttcccttgttctaggcactccctagatatgactgccaggctgcccacctctaacaggtcttcctgtccctttaagacttaagggatctcaatgggtattcattggctggagggcagaaggggattgggctctttggctatcccagtccatcctttattctgtttgatttactggggatattgtggttgattcggcctttgcccctttaaacatcggagtgagagaatagaggcccctttctggccagatcttgccttttaccagctgctggcctaggcctagtcttttctgggcccctcaaagccctggccaaagcggtcaacaccctacgggccactcagacagagcttgagggcaaggccaggctgaagttccacctgcagaaagccatctcagtcactgcacagcccccacctcctgggaatgctgcaggttgtgcctcggccaggagaatgtgtgcattggtgtgtgctctctcgtgggtcttgtgagcctgggtcagacccaatatgcaggcctaagtgctaaccatctgtcccctatgtctgggccatgcagcagccagtaggctggctcctctgcttctggcgttccagtgagtccgcacccactaccctgcacgcagcacacttccgcctggcatcccagcggagtgttctggctcggagccttccctgtgtgcttagacctcctgtgtacctcagtcacttaccgtaagtttccagaggcttgaggaataatagccaacttggctattttctcaaagaaaaataatgacaatccaagatttgcattggaaacctgaacaggcagaatggggtgtgaaactgggcaaatctgtatcaaagccttgacccctagatgtgcctgcctgagggaagaggcccgtctaccccttctggcctgctcactctctccgcacccagccctcttccgtccctgcccctagccctggccctgagccccccacctggcctctcttcttgccctccttgaatcctgc

SEQ ID NO: 642 - DNA, 585 bp, Homo sapiens
gagcagtggtttgtagttctccttgaagaggtccttcacatcccttgtaagttggattcctaggtattttattctcttggtagcaattgtgaatgggagttcactcatgatttggctctctgtttgtcttttgttggtgtataggaatgcttgtgacttttgcacattgattttgtatcctgagattttgctgaagttgcttatcagtgtaaggagatttggggctgagacaatggggttttctaaatatacaatcatgtcatctgcaaacagggacaatttgacttcctcttttcctaattgaataccctttattttttctcttgcctgattgccctggccagaacttccaacactatgttgtgttgttgtgtagtgtagtacgatgtctagtgatgagtttgctaatacaatgccggttaggccacccacagtgaagagaaaaatgaatcccagggctcagagcactgcagcagatcacttcatattgcttccgtggagtgtagcgagtcagctaaatactttgacgccggtggggatagcgatgattatggtagcggaggtgaaataagctcgtgtgtctac

SEQ ID NO: 643 - DNA, 276 bp, Homo sapiens
gacagagcaagactgtctaaaaataagggggggaagggggatgtttgaaatgctcattccccattgctgtaaagaaacagcacttcaacataaatttaatttcctcagcaaggccatttttatactttctgcagaaaaggtacactcgccagcagttttgccaggagagtacacccaacaaaggagacagggtcatttataacccgaagcgtccaccctactgttgtgtccggtttccacttgctagaacgggacctcacattctgtatttgtccc

SEQ ID NO: 644 - DNA, 431 bp, Homo sapiens
gtcaaatatttcaaggcattccgagagcccccatcttcagggttaaccacatgtagtatgctcaatacagccggtgtctaatacacagccaaacagtcgtctttccattaaaatgtgatttttgcttctgcttttccatctagcacatctgttcttctagcggttcttgtgtcgttagccgcctttccatcccaccttggcgctattcttttaattcaattgtgcgcaaattgcatcaggctgtcagggcttcgctttatgaatttccctttgaggacttgcacattcctctcggcacagaggtcggagccggtgggtgcccggctgccgccgccccgcgatcaatggcacctgaagcttccccgggcgaggccgtggctgcctggcttggtcccggagtccacggccacagagactggtgccttgaagac

SEQ ID NO: 645 - DNA, 686 bp, Homo sapiens
gtcaaagtcattctccctccagctttgttccgttgctggtgaggaactgtgttcctttggaggaggagaggcgctctgctttttagagtttccagtttttcctgctctgttttttccccatctttgtggttttatctacttttggtctttgatgatggtgatgtacagatgggtttttggtgtggatgtcctttctgtttgttagttttccttctaacagacaggaccctcagctgcaggtctgttggagtgcctggctgtgtgaggtgtcagtctgcccctgctgggcggtgcctccctgttaggctgcttgggggtcaggggtcagggacccacttgaggaggcagtctgcccattctcacatctccagctgcgtgctgggagaaccactgctctcttcaaagctgtcagacagggacatttaagtctgcagcggttactgctgtctttttgtttgtctgtgccctgcccccagaggcggagcctacagaggcaagcaggcctccttgagctgtggtgggctccacccagttcgagcttcccggctgctttgtttacctaagctagcctgggcaatggcgggcgcccctcccccagcttctctgcggccttgcagtttgatctcagactgctgtgctagcaatcagcgagactccgcgggcgtaggaccctccgagccaggtgc

SEQ ID NO: 646 - DNA, 331 bp, Homo sapiens
gccgccgctgcgcgcctcgccgccactgtctgcctctccgccgctgtccgtctctccgccgcgctgccgctgtccgcctctccgccgctgtccgcctctccgccgctgtccgcctctccgccgcgccgccgctgtccgcctctccgccactgtccgcctctccgccgctggccgcctctccgccgcgctgccgctgtctgcctctccgccgctgtccgtctctccgctgcgctgccgctgtccgcctctccgccgctgtccgcctctccaccgcgccgccgctggccgcctctccgccgctggccgcctctccgccgctggccgcctctcc

SEQ ID NO: 647 - DNA, 134 bp, Homo sapiens
gtatggaatcttcgaatggactccaatggaattatcatcgaatggaatcaaatggaatcatagaatggaatcgaattgaatcatcaaatggactcgaatggaatcattgtcaaatggaatctaatggaatcatc

SEQ ID NO: 648 - DNA, 840 bp, Homo sapiens
gaggggaaaagtgtaaacactttaattgctgtacatggtgacacaaatccatgttgttaatctaagtggaaggggctgaagcacacaacgtaattcaaagagtttacttgagccacgatgaggacagctgcctggaagaaacagacccaagtatccttggatatgaactccctttggagctttgcaacaagcagtttcttaaaggcaaaaaagggtccagaagtgggatgatccaaagaggtttgtcacaaattctcattggcttatggaaataacatttattagtgactggttatacactgttacactattattgggtgtggattatagtgtctggtgtggcgttattggttaatttatagctactgtggcaacagcaagcagcctagatgaacacacagctcaaagaggagcaggacagaactgccgtctcatttgaatatctctctgggcctgattatttaaaaggacttgcatttctcacatgaaagttattttcttttctccatgtccataaatgagaataaatagacgtaaaatagatcttttcgaggatgaagtaaatggaatgaaaaacaaaacccaagctgaccagaaatcatagagggaagaaaaggttataaatatatggatttttcaaagtgattttaagctattaggaatcagttaaatgttgggggattttgtctgagaatgggctaaaggagaatgtcccttttgccttctgaagtttccctgaaaatcactaataggaggcagatacatagtagaaaaggcatacaggtttctgcaatgtgtgtacactggagcccttagaacgaagacccagacacacgatgc

SEQ ID NO: 649 - DNA, 145 bp, Homo sapiens
gtttcctgtagattccggctaatggtttcccctggcatttgacttcgtgatgtgtaaccgagttctcttcttgaagggggaaacgcattccagagcatttgttcgggctcatgtaggaatagatctttgactgcccggtaaatac

SEQ ID NO: 650 - DNA, 4279 bp, Homo sapiens
gccctggctcctccattgccttgctctcagcccctgacatccagcccatacctggagattgagctgcacccactgctctgggtctcagccctgtgatcacctcagcagatattccgagcttggctgtgcaggcaacactgagccatagtttactattctttcatgcatttctatcagagagtcagcaaaggtagttgacaaagcccaagggagaatgttgaggggagttgatgagcttgactttttcatacaggatgaagccattgataaatctatgtatgctacaaagtggtcaatatgacatggaatcactgaagactgggatattatggaaaggttcatggagcaagtggtttttaaatatctttgagcagaatctgaggaccattattttttaatgacagaacttccactgaatacactagaaaatacagaacatttttgcagaaattatgtttgaattatttaatgtaccaggattctacattgcagttcaggaggtactagccttggaagtatcttggacatctcaacaagtgggtgaatatatgttaatgagtatagtcattgacaaaggagatggagtcacccttgttctcccagttgtagaaggttatgtaattgggagctgcatcaatcacatcctgattgtaggtgatactgtgtatttcattcaacaactgctaagggagagggaggtaggaatccctcttgagcagtcactggagaccacaaaagtcattaaggagaaatactgttacatttgccctgatatagtcaaagaatttgctaagtatgatgtggatccctggaagtggatgaaacagtacacaggtatcaatgtgatcaaccaggagaagttcataataaacgttggttacaaaaggttcctgcaacctgaaatatttttttacccagagtttgccaacccagactttatggaatccatcttgaatgttgttgatgaatacaaaactgtcccactgatgtgtattgtccactgtataagaatgttgttctttcaaggggtttgaccatattcaggtatttgaatctcaactacagagagatttgaagagtggtacatgccagattaaaactcagtaaggagctcagtggcaggagaatcaaacctaagcttacagaggttcgggtggtaatccatcacatgcagcactatgccttatggtttggaagcttaatgctagcctcaactctggagttatttcaggtctgtcacaccaagaaggactataaagaatatggtcccagcatctgccaccagaaccttctctttggagtaatgtcttagtgtctgccttgaaagcaccatttaatagtgtcatgttggggaacaagtgtccttcagaacccagagaagactaccatttctaaatgacatttggtgttgatgtctgagcagcatgcttgcatcacctagtgcatgaggcacagggcagagtcatttcagtaaaagccatttctttatgtgttgactgttgtatgcccactcctccttctctcactccctttcttcatgcttccacagttttcctcccccttttcacttgaacttttttgttgacaaataccattctgaaggaattcaaatgtgactctgaaaattgttaagaggaaaaaaaatttcaaaaatggcccaaaatagttctcccccaggaaagaatgcagtggtataaatccttttcccccagcctatttttataaataaaatgttataaacaaaatacaaaaaaccaataacatagcaatatttacaggatgcaattaaagcagtgtatagaggaaaatgtatagctttaaaacagaaagaaaaaataatctaaaattcataattaaaacttccatcttaagactctagaaaaagatgagtaaaccaagccaaaagtaagtaggatgtatgaaataaaaatgtcacagtggaaaacgataaatacagaacaggataacattaaaaacaaccaaagaaacccaaaattgcttatttcagaaagtcaagaagataaataatatttagttaaattgaccaagaaaaaagaaagaagacactaattcccaagatcaagaatcaaagagaaatatcacacagaccctacccttaaaaggatgttaagaaaatagcataataactttaaggcaaaaaatttgacaacttcgataaaatagaacaattcctagaaagacacaaattaccaaaactgactcaaggaaaaagaaaaaaaacaaataccaatatcaagtaaagaaattgcatcagtaatttcaaatcttcctgtagagaaaaaatatacttcactggtgaattctatcaaactattaagggaggaaataataccaatgttacaaaaactttattcagcaaatagaggatgaaggaaacttcccaactaactttacttcatttgatatcaatattaccctgatatcaaaacaagacaaagacattacaagaaaacacagctatataccaatatcccttgtgaacctagacataaaaattcttaaccaaatattagcaaatgtaattgagtaacatgaaaaggattttataccataatcaaatgaagtttatctcaggaatgtgaggttgacttaacatccaaaaatcaatgtaataaactatattaacagaataaaggacaaaaccatatgatcatctcaatagatgcagaaaagcatttgacagaattcaacactcatatatttaaaaaaatctcatcaacttatgaatagaagggaacttcttcaaatgatcaaggcatctaccagaagcctatagccaacatacttaatggtaagaatgtgcttccctctagattaggaaacatgcaaagatatctgtgtttaccacttctatttaacaatgcaccacaggacttaatttgtgcaatagtcaaggaaaaaaggtatggaaaaaagacaactctttttattgttagccttgtatgcagaaaatcctaaggaacacacccacacacacacccacataccacaccccctcccagacttactagaactaagagggggcttagtaagtttgtagagtatatgatcaatatacaaaaatcggttatatatatagtagcaacaaacaatacaaagatgaaataaagaaaacaattccaatcacaatagcatcaaaaataaatgtcttagtttgttttatgttgttataatagaacacctgagactgtataaagaggtttatttagctcacgtttctccagactgggaagttcaagaagcatggcaccagtatctgcttagcttctggtgagggctttagcagtgcatcacaacatggcagaagaccaaagaggaagtgggaatgtgccaagaggccaaacacaaggtacaaccttgtacaatgggttgctttataacaatccattctcagggcaactaatctattcccacaggtaccaatccagtttcatgagagcaagaactcactcactatatgaggactgcaccaagctgctcaaaatggcagagcccccatgacccaagcatctcccattaggccctacctcttaaaggttccaacatgatttttgacagaaacacggaaaccatggcattccacccttggaaccccaaagtcatgtccctcttacactacaaaatgtaattattcaatctcaatggtccccaaagtcttaatgtattccagtaataattcaaaggtcaaagtccaaagtctcatataagactcaaggcaagttccttctagctatgagcctgtaaaataaaataaaataaaaagttatttacttccaagatacaatggtggaatagtcatatggcagacagttgcattccaaaagggagaaataggccaaaagaagaaagaggtgacaggcctcaagcaagttcaaaactcagcagggcagacactaaatcttaaagctccagaataattctccactccatgtgctacctcctgggcacagtggggagtttttatccctaaagccttgggcagccccacctccattgctttgttgggcatagccacatggctactctcactggttggagttggatacctgtggcctttccaggctgaggttgcatggtggcaatggctatatagttctggagtcgcagtggtggtccacttcagggactcactagacattgccctggtacagactctttgtggcagctccaaccctacatttctgctcagcattgccctaggggagatacactgcagtggctctggccctgcaacaagtctccacctgagctcccagtc

SEQ ID NO: 651 - DNA, 71 bp, Homo sapiens
gagccgacccaagggccgacccccgcaaggagctgaaggcggcgggagcccgagtcgcagccggcgtcagc

SEQ ID NO: 652 - DNA, 590 bp, Homo sapiens
ggctctcatttgcttgcctttctaaaaataaatgagcctctggccgacgcagttactcacgcctgtaatcccagcactttgggaggctgaggcaggaggattgcttcagcaaggagttcaagaccagcctaggcaacaaagtgagacactgtgtctacaaaaagaaaaaaaaagattagctgggtgtggtggcatgtgcctgtggccagttacactggaggctgaagtacaggatcgcttcatcccaggaagtcgaggctgcagtgagctgtttacaccactacactccagcctggtcaacagaccgagactctgtccctaaaaaaaattaaaaatttttttaaaaatgagcctcttagaagtagcagcactgggctattgagatgctgactcaactcacatgccacaggtctaggagctgagctgctgtttgtcccctgcagcccatcagccaccaatgacacacagcaggatgctttactctccacccatgctacactggctgacagtgtggattttatgtaacacttacgcgatggagagctcattactttcagaaagctaagatggtggtggagggtgctgggggc

SEQ ID NO: 653 - DNA, 136 bp, Homo sapiens
ggcgcacctgcccttcttctacggcagcatctcgcgtgccgaggccgaggagcacctgaagctggcgggcatggcggacgggctcttcctgctgcgccagtgcctgcgctcgctgggcggctatgtgctgtcgctc

SEQ ID NO: 654 - DNA, 126 bp, Homo sapiens
ggggccggctcctgggcggctgggcagggctctctcgtgccgggcgcggcggccgcctcctgagggctcttgcgcggcccggccgggctggccgccctgtcccccgagtcctgagggccgcgctcc

SEQ ID NO: 655 - DNA, 675 bp, Homo sapiens
gcagtgcagctgccgctggttttcagccttgtgtggcttcctaggtgccaaatggctgggccccctcctacactattgtgcttcatacaggagcaaaaatccttccgaagagcaccccggctggctccccttacatcacaatggccagaactggggcctgcccacctgcctggatgtccgggtgtgtccggaccaaagctgagctctgttggcagcaggaagagagactcctgttgagcaggcagcctgttggccaagccagccatatccacggcttctctgaggttctcaggtcagaatcacgacattaatagtgttattgccatggaaaagaaaatgagcttcaggataatctgctttacaatgccacttctggaaaattccactggcaaaatgtagggcttgcctctattttactccctctcctagcaaggggcaccttgttaggaatcctgttttgacagagcccagggtaggttttgtcatgactcagagggaagatggggccaccaactcccctccctttatgaggagcctctgcctacttcaaagctggtgtcctgagctctgccacaggtgagtgagacagagaaatccacagaggtgtctccatagaaaccccagggattctgcactgtggtcacccccacagaaaagcatccaccctggctcctc

SEQ ID NO: 656 - DNA, 248 bp, Homo sapiens
gttattttcctgaacacctaacagtgatgctgcaggctttctggacgggacgggacctcagacacaataatccattccgccgtcgccacgcagtgcctttcgaccattcagtttcagcgctgggaggaaggagaggcgtgcgctcttgctgaaggtcgcgcggggctcaccgaccggttgccaggaagtctacctcctccacgtggcaatcgccgctgctgctcggctccctgccacggggctgcccc

SEQ ID NO: 657 - DNA, 131 bp, Homo sapiens
gggccagcagctgtggagggcgcgccaggtcccccagcagtgtgggcccgcccacgccttggtcgaattctcgctggacctcagccgcctccccgtggggcagggatcgggacctgcagcccgccacgctc

SEQ ID NO: 658 - DNA, 550 bp, Homo sapiens
ggatttttgtactgcttggctttaacacagtaattttccctaattgtggtgttcgagagcctccgggggaaaagagagacaggaaatatgtcaaactgtgtaacttttctcaaagaaatagctggtgctatcaatctctccatttgagatgaactgccagcgaatactaatggctgggagatctgcatcattgatcttcatcaggcgagtgtattatccttagtgaagtgctgctgtaccgcccgcgctgcccacctcccagtgcaaaccgccgcttcctctttctcttgcctgtaactttcattttaacttttgagtcattaatcaaggcagtgaccttgactacgaaagtctaaatttggtgaataaatggaatggaaatctgaagatgtacagctccagaaacaggagaccgtacactgattcttgactgttgtagtagaaacgctgaaggaatgataccatttactgcaaacttctgaacacctgctctagtgtctcagcttcccactgtcctcaaatgatggaatttagaaaattaatgttaccc

SEQ ID NO: 659 - DNA, 114 bp, Homo sapiens
gggagccatgacccctgacccatcgaggccgccgccgggccgggtcgaggccgccgcctcaacagagcgcgccagggagcagcgcccgtcgggagccatgacccctgacccatc

SEQ ID NO: 660 - DNA, 138 bp, Homo sapiens
gccgctgggtgggggaggggcaactctccaagcacaacccgcgctctgtccctcggccgcgctgattcccaaccccctggcggccggtggcacccgggaccgctaagagaggtggtaggagggactggcgagccgagc

SEQ ID NO: 661 - DNA, 1059 bp, Homo sapiens
gccccgcccacaccgccccccgcccccccaccgtcccgcgtaagtgtttgtagaactaatgagcagttaaagggaggaaaaaaaacctgatttcttccatttcctaaggacacacgaacatggcaatcttgcactagagacacaggacccaagaaaatgtttgagatgtggaaaaaaaatcaaaattaatattaattatatatttataatatgtaacagttcaacagcaacttgattctattcataattatatatgttagatttaatgtaggatacgtgtatatttcaacacataagacccaggtggtgctttgaaaagtaagagtgcctagggcttgggaaggtctttaagcctccctgcctaaaaaacctgtagttctagctagtaacttacccagctagtttggggcaatgcagaaaagcccatatgcaaagcaaaacaaagctcttacaaacaaagcaaacacaaaacttccataggaactgccttgcatggaagtcccagttcgatggccagtaaccactgcatcagagcagcccagcaccctcccctctgcagctgcttttttggtccaagctgcaaggatggtgaggagggaagcatagcttggaagctttgagaccccatagatgagatgggccttcagccttcagtcctggagcctgtggtggaaattcagcaaccaggcaaagccagaacaagctaactgcaacgctccttaacttgcccagtggttccccttcccaagctggctggtctccccagggcagagctctaagctgcagagttataaaccagcaggggcaggcttctggatgaaaaactaggcaccacacataaaagctcagagccgagcatccagataagcacaaaacacccacaagatacttgattgttgatgttacactgatctctgtcagctcaaaaaaaaacatcactacagttgattctggttgttggtagtagttatggtttataaagttggctgtgaacactgaattagcaaatcctgaaccactgctcctaggggaactacaggattagggtctcgtgagctc

SEQ ID NO: 662 - DNA, 426 bp, Homo sapiens
gtttgtcaagctccaggactggggtaaaggatttgacaaggtctgttgggcagggatggaatcagatgaatatctaagtggaagatatacagacaattgtaactacccctctttctcacatggctctaaaggggaaaacagatgagtgcagttgctttgtctttgggtaaagtcaccaggagctgcctgcctgagtgaaccagacaatttaatgtgtgccatttagtgaggggccttgttttaccaccacatttgaggatggggggagggaagcctttctgttggaatttgtggcccttggacactcctcccacctccaccctttttggcggtaaaagcttttaggtgctgcctctttaagaactcagatccggccggatgcggtggctcatgcctgtaatcctagcactttggaaggccgagatc

SEQ ID NO: 663 - DNA, 387 bp, Homo sapiens
gagaaatggctcaggacctgtggaaggagagggtcccggaggttaggctggggcccccggggaaggctgaaaaagctgcgattcctcagctgcagcagccaagttgaatggcctggtgcccttgtttccctgctgagtgtggttccacagcaccggagcaagctgcgactgtgccgtcaccagcctcagaaagtccctctctggaccaagggctgcttcctactatagacttgggcttccgtctcatccagggtctcatttgggacgcgttgttccttctggcagtgacgccatcacctgcttctagaagggaacctgcccattcatgtgggcgggcagctgctgaagagggaagattcattgtttaggaccatttgcataagtaac

SEQ ID NO: 664 - DNA, 58 bp, Homo sapiens
ggggcattaaatatttaaacattgtcttcaggtaaccgccccccgccccccgcccccc

SEQ ID NO: 665 - DNA, 204 bp, Homo sapiens
gtgagagcggcccgcggccggcggggtcccgggacaggcccgcgcggggccgaggtgccagggcccccagagagcgggacgggcggtgccaactggacaagccgacgctacgaaggcctgagggacagcgaggcatcctgggaggcgccctggctcagacgctcctgtgggagggcgtctgcgtcctcagtttccccaggacgc

SEQ ID NO: 666 - DNA, 189 bp, Homo sapiens
gccgcggagctcccggacccagcagcctgggaggctggggtccgccttcttcccaggcccgctcgcctcgggtgctggctggagggctgtggcgcgggatggtaggactagcgctgagcaggtgggattaagctctccaatgaaacatggccccaccacactttggtttggaggcaaacacccagtagc

SEQ ID NO: 667 - DNA, 435 bp, Homo sapiens
gagctcgcagtttgctgggcacggtgcacgtggctgaggctccttctgaaattgaccgaagtgtgcaggaagtgagggctgtggccacccacccagggcgagggaatgggcttttgaaacccggcctcatcagcacgtctactgcaccactccctcctcaggcatactgagcttgcttatgatgttgggacccaaagggaaaaaggcagtctgtaaataagctctctcagacttaaaattaaattctacattttcctgagctcatgggaattgacactgccattagtctgtaatttgtttctcaaaattcttctattttaagaaattaagcaggaggagcagagggtggaaaatgagcgggagggagagggactgggggaaatgaggacaccccaaagccagacagactggggggcggggatgcgctgtgggggc

SEQ ID NO: 668 - DNA, 416 bp, Homo sapiens
gctggtgccagcagagccggagctcgtggtgctctgggcacaacctcgcctttggtcgtggttttcccgttgaataatgctgcagaggacagcgagaaaggatagtgtgacaaatgcatcgcatatgacagctcacagatcgcctctgcgcccaagcctcatgaaaaccgcactcctctcctgggacacagacgccagcgccacccccaccctggccaggcaaacgcgcctggggctggcgggtgaggtcttccagctgcagaccccagccaggccctccctcctgcaggtgcctcctggctgctcgatttgaggctcaagctgtttctgtgcccagccagtgtggctccttaccgagctcgcccagaacccggactgtgcagcccaggctttctctgcacccggtgacgccaggc

SEQ ID NO: 669 - DNA, 79 bp, Homo sapiens
gttcttgcctgggctccacacaggccagcgcgcgctcagctcggtgcatgcggctgggccctgcgagccacgcttctgc

SEQ ID NO: 670 - DNA, 221 bp, Homo sapiens
gtccatctccactttcaccagcccgtaccgcaagcgccgcctgcaggtgcgctgaccccgcgcccagcccgaggccaggggaacccacaactacctcaacagcgtgcgggactccattcggtccacagggctggatggcctggggccgaggccaccccgaagcccccggcgaccccgccgtctgcgtcctattacccgaacactgcacaccgctgccctac

SEQ ID NO: 671 - DNA, 324 bp, Homo sapiens
gcgtcctctcaaacactagggcgccccgggcctgcagcttcatgcatgcgaggtcccgggtccctcccattccgcccccaacacctgcccctcagcccctacgacccgcacgcctccttcccgctgcccttccgtggccctggtttgggacacccagcccggccttcatgaggcgccccccgcccagctccgcccctccacgcccctgtctttagtctcttaggcggtggccgccgccgccacagccctgggcctggcacccccagtcgcccgcggcctccttgtggtggcaccggcgtccccgctggagctgctggaggccac

SEQ ID NO: 672 - DNA, 170 bp, Homo sapiens
gcagtcccaaaagctcctggaggtgacatccaggagcaccaccgcgctgcccgcagggagacccatggcaaggcgcgcccactaaggcggccaaggaagaagcagaaggacaggaaggcgccccagagctcgatctcagcccgcgagcaccgaccaagttcctggtctcc

SEQ ID NO: 673 - DNA, 78 bp, Homo sapiens
gggttgggcaggcagccgcaggccccatcctcggcggcccctgaggcgctggcagttgcagccccgggggtcagttcc

SEQ ID NO: 674 - DNA, 30 bp, Homo sapiens
gaacccgctgccgccgccgccaccaccgtc

SEQ ID NO: 675 - DNA, 115 bp, Homo sapiens
ggtagtggcggtgaaagaggcatgacactaaatcgacccttaggacgctcccctccgtccccacccctcacccccttcccacacacaccctcattcctgcaccccctcctcaaac

SEQ ID NO: 676 - DNA, 214 bp, Homo sapiens
gcgccggcccccaggccaccgccgctgatgggtcggagccaccccgcgggctcaggaggagccgggaggcgacctcgggctcccttgcggggctgcaggagcaggtaggctgcttgaagtgtcggaagctgcggcgccgtgggagaggccggcgcggctgagcgcccttgggtgctcctggcgagtgcacgagtgactgtggcagtcctgctgc

SEQ ID NO: 677 - DNA, 379 bp, Homo sapiens
gcctgcccagactcctctctggggtttccattttatctctcaagcttttaagatgccaaaaggaaaagcctttaggaggacgctaaggataacttcgttattcttcagttctctgctcctcctccagctcctctttggtcatcatcttctcgtactggtttcccctcagcttcccggggctgtatttgaaggagaagccttctccgtcctcctcctcaggcccttccgatgatggccccttctcaccatccaagtcctgctcctcttcctgcctcgcctccaccgcctgctcctccgcctccgctggcgccgccgcgggatcccctggcccttcgggctcccccggtcccgcaggctccccgagctcccccagccccgc

SEQ ID NO: 678 - DNA, 1336 bp, Homo sapiens
gccccacaaagcttttgattgttttccactgatccggctataattgctggaattcttccagctctgcaaggacaaatgtttctacagtatatttagaacaattttccaatcccaacccattgaggaagtaaatacttatgtacaaatcttcaccttctaaacaatagaaaactctgatcacgttcaatccagccaaccctaattttttaagaatacttgaggttgcttatactaaccttcatttttccagatgtttttgaaagttagctaattctgtcttcagagcgtgggtcactggatctgtgaaaaccgttgaaaaggaccaagtctgtctttgtagttggaagctgaagccaggacaaggtttttttctttccacggacttttgaataccgtgccaagtttcaaaagatttctgtaaaattagaaacagattttgggggcgttcttggccctcaaatgaactgtgagtgactcaagggaagttttatagccttctcatccttgtaactacaccaacatctgcttacgttgacatacagaggtttttattttttcttttttaccagttcaggtttatgttgcattttcttctagaattcactgaaggatcactttagcaagtcattgggttttgcataacatttttatttgccactaaaagatgaatttaaaataatgaaacttgcaggtctgtacattaaacatatatctactttttaacagaggaagaacattgaagccacataagattttgtgagaaatgtgccatataactgcacttttttttcctctggaagattatgaggtattgcagacagaaatgtttttctttcagcacaatttctttgtccatatagcaccatatgcactttcagtaaatacagaagtttaaaaattcaactgtctaaacccacggctgctttactttaaagaaataaaatgccatctggtgaaatttagtatgggttaggtgtgtatgcacaggctagaaagatggaaagatcagtaagaataatttaccagcagacctttggaagaatggaaatggctttacaagagtggtatttttgctttcctctcagaatatcttctgagagaggagaacatctagtaattataaagatttaaaaataaataaaaaagcatctgaaaagaaaagtaaatcttatgtataatttcattttggctaaatctacataattccaaagaaattggtcatcttgacagattagtaaaatggttgactgaattaaaaaaaatacacatacaacagtttcttggagtgttctgtctgttttaatgcaattcacttggatagattttgtggttccac

SEQ ID NO: 679 - DNA, 138 bp, Homo sapiens
gcttgcaggccagctggagttccgggtgggcgtgggcttggggggccccgcactcagagcagacggccggccctgccggccctgggcaatgaggggcttagcacccgggccagcggctgcggagggtgtactgggtcc

SEQ ID NO: 680 - DNA, 92 bp, Homo sapiens
gcagctgagcatggcagcatggcacctcttcccctgcctcccgccgccccctcctcatttcctgcctcgcgcccgtgtattaaagggcccgc

SEQ ID NO: 681 - DNA, 217 bp, Homo sapiens
gactgggacacctgtggatgactgcctcctgcctcagttactagcaaatcaacccccacttctgcctccctgctcgcggaggcccccacagcagctccacctgtttggggatgccaggcagcttacatctaccggctttattagttggctggaaacctgctctccccctccaggtcctggcactcacagatgatgggtcttaacttctgggtgtgac

SEQ ID NO: 682 - DNA, 1012 bp, Homo sapiens
gcctgacctactgatgagtccagtgcagaacagaggaagcagggatgggtcagtgtcagtaccaagtgcagtgcatgctgggagttaaaaagagggtttcggtcagagttcaagcctgaaaaggggccaggggagaaagaactcttttgggaattgggaaagcaacgcctctcagcagggattcaatgatagtgctgcctcacagttggggctgagatttgatactacaattttctgggcttgcaagatgcttatctcttcgaacccagttggagcaggtgcaaagcaaattttctgttgttaggaaggggcaggagggactgaggagcaaaaagaaagctgacaaccgtttcttttacggtaagctgctctcagagggccacgtttaaagattaaacaagcagttattaacatctatttttaataaaaaccattactaaaaagacaagtgaaaattgtccactacaagaagtcagtgtttcatacatcaagtagagagaatattttacttctcattatatttgatacaataaagtatttcaacaggacatactgttttgattttagggagagttttagacgaggaagagatagggtcatgataaactccttaaacattcctggtgaaactgcctagggccctttttggtaagaagcctgcatcagcctccaatcacccaggctggaaacctcaaaaccgtgctcaatgccttcctttttccttgccacctttgaatgagtgctcagattcataagatggtagccacttgcttccatgccttctcccttctcccactgatgtcctctgacttggggaccatgcccaggcatgctggctgtcctccccttccactgcatcctttggcatcacagctctggtcagtgctgcacagttcaaaggcggctatggctcattgctgcctgaagagcgagcccaaaccccttaaaatgacattcagaatcctcctgctcccaatcccactcactctcctcgccttcctctgttacacgc

SEQ ID NO: 683 - DNA, 581 bp, Homo sapiens
gtcccccagcccgacacccataaagggtctgtgctgaggaggattagtaaaagaggaaggaacgcctgtttgcagttgagagaagaggaaggcatctgtctcctgccagtccctgggcaatggaatgtctcggtgtaaaacctgattgtatgttccatctgctgagataggggaaaaccgccttagggctggaggtgggacatgcgggcagcactactgctctttaagtcattgagatgtttatgtgtatgcatatctgaagcacagcacttaattctttaccttgttcttgatgcagagacctttgttcacgtgtttatctgctgaccttctctccactattattctatgaccctgccacacccccctctccgagaaacacctaaaaatgatcaataaatactaagggaactaagaggccggcgggatcctccgtatgctgaacgccggtcccctgggcccccttttttctttctctatactttgcgtctgtgtctttcttttccaagtctctcgttccacctaacgagaaaaacccacaggtgtggaggggcaacccaccccttcagcgcagtgaaccc

SEQ ID NO: 684 - DNA, 2472 bp, Homo sapiens
gatctcggctcactgcaacttccgcctcctgggatcaagcgactcttcagcctcagccttccgcgtagctgggattacaggcgcatgccaccatgcccggctaatttttgcatttttagtagagacagggtttcatcatattggtcaggctggtctcaaattcctgacttcaggtgatccgcccgcctcggcctcccaaagtgctggaattacaggcgtgagccaccgcgcccggcctgtcttgggatctttagtggtgccggatgccctaggttttcatcttgggattctttggaggccatacgcccgagttattttgttttggaatcatttgggagaccgtatgctccgggttttttttgttttgtttttttgtttttgtttttgtttttgtttttttttgagacggggtttcgctctcgccaggctggagtgcagtggcgcgatctcggttcaccgcaacctccgcctcccgggttcaagcgattctcctgcctcagcttcccgagtagctgggattacaggcacgcgccactatgcccggctgatttttgtatttttagtagagatggggtttcaccatgttggccaggatggtttccatctcctgacctcatgatccgcccgcctcggcctcccaaagtgctgggattacaggcgtgagccacggcgctcgactgtcccggtctgtttgtcttgcaattgtttgcagtagcgtactccctgatttttcgtcttgaaattctctggggaactgcactcccaatcttttcatcttggaatcctttagcggaccgtattgccctagtgcttttgtcttggcactgtttgcagtgctgtacaccccaatcttttcgtcttgaaaacctttgggatactgtacccttggtcttttagtcctggaattctttgcgggatcgtatgcacccgtttttcatcttggaatcttttgggagaccgtatgccccagtctttttgttgtgggattatttgggatactgtattcaccagtctttccatcttggaatgttttgggagattgtatgctccagtttttatggcttggaatcgcttgcaatgccctatgccctagttatttcaccttggaatattttgggatatcaaatgccccagtcttttgtcttggagtcatttgcagtgttgtatgcgctagtctttttatcttggaattatttggtggactgtacaccccaatgttttcatcatgaaatcttttgggaaacgctatgttccagtcttttcatcttggaatcttttgtagtgccatacgacccagactttttgtcttggaatctttaggggcagcttatgccccagtcttttcattttggaattctttggcgactgtattcaccagttttttcatctcggaatcttttgtgagattgtatatcccaatctttttgtcttggaatcgtttgcagtgccatctggcccaatcttttcattttggaactctttggggggactatacaccccagtcttttaatctacgaatcttttgggagtccgtatgccccaatctttttgtcttacaattctttgtgacattgtacaccccagtcttttcatcttggaatcttttgggagacagtatgccccagtctttctgtcttagaatcatttgcagtgtcatacaccccagtcttttaattttggaatcgtttgcagtgcggtatttcctagttttttttctcttggaattatttgggggactatataccacagtcttttcatcttggaatttttcagggaaccgtatactccagtctttttatcttggaatcatttgcagtgttttactccctagtctttttttttttttttttttttttaatggagtctggctctgtcgcccaggctggagtgcagtggcgtgatctcggctcactgcaacctccgcctcccgggttcaagcgattcttctgcctcagcctcctgagtagctagaactacaggcaactgctaccatgcccggctaattttgtgtatttttagtagagatggggtttcatcgtgttagccaggatggtctccatctcctgacctcgtgttccgcccgcctaggcctcccaaagtcctgggattacaggcgtgagccactgtgcctagccattccctagccttttcgtcttggaatcatttgtagtgtcatacgccccagttctttcatcttggaattctttaggggaccgtgtgccccagtgtttccatcttgggatcacttgcagggctgtactcttcaaatctttggggacactgtattatgccccagtctttcccatcttggaatctttccagagaccctatgcccagtctttttgtcttggacttatttgcagggctatatgccccaggcttttcatcctggaatcttttgagagatcgcatgccccagcctttccatcctgggatcatttgcagtgctggactccctaatctttttgtgtc

SEQ ID NO: 685 - DNA, 1049 bp, Homo sapiens
gtatgccccagtgttattgtttcaggattgtttcaggattctttgcagtaccgtgcaccgcagtcttttcatcttagaatcctttggggtactcccggttcatcttggaattatctggaagaccgtatgcccctgtttttttcaaagtaccacagttttaaacatttatgttcacctcttgagagacatcttggttacttccagttgccccagtttttttgtcttggaatctttggaggtactgtattctccctctttttgtcttggaatcatttgcggtgctgtacaccccagtcttctcgtcttacaattctttaggggtaaaatatgctccagtcttttcatcttgggattctttcagtgaacgcaggtcccagtttttttgtcttggaattctttatgggaccacacaccccggtcttcctgtcttggaaccgttcgcagcactctattgcatgtaataccgccggcggcactctacacgacttggagccgcctgcgctaccgtatgcagcactctccacggtagctccctggggactcaaacttttccagttccccatctttaggctgcaacagcatggcaatgcccaatagaaaacaacgcaagcagtagccatcacgctgccaacactggcggtgccctcttgggcagtggccactgtctgctgggcgcattactaagcccagagcactctatgaactcatcatctccatctggtgtccctgtcctgcttgctgctctagttgccctaaaaatatgccccagtcttgttttgagcaggaataataagatgcacagacacgcaaatgattgccaacgaacaagtcatattttattatactcacagtccccaagacacgggaggggggtcactccacacagggccacacagggaagtgacaaagcagaatgagcaggcgtagagagagggaaagcactggcagactctttattgtggatttctcaggaaggaatgggcaaagcaaggtaagcaaatggcacaaatttaggattggatagtttgcattgtttcagcagattctgc

SEQ ID NO: 686 - DNA, 228 bp, Homo sapiens
gctgaagccggaatactccctctaagagccctgaccggcaggagggttcgcttccagtgtttagctcaggtgagacacagcagaggtaacacaacgaaacacgtgaaataacaacaacaacaaaagcagtgtgtcactgacagatcccagagagaagaggacagcacgtcttgcagggccagcgagaagcggggagccatctgggacatgcacgcttaggcagcgggc

SEQ ID NO: 687 - DNA, 544 bp, Homo sapiens
ggcttactgcaacctctgccttcccagttcaagcgactctcctgcctcagcctcccgagtagctaagattacaggtggcccaccaccacgcctggctaattttttgtatttttagtagaggtggggtttcaccatgttggccaggctggtctcgaacaccttgacctcaggtgatccacctacctcggtctttcaaagttctgggattacaggcgtgagccactgcacctggtccccgtggggggtttagagcaagcaggcatgagttccgtgggggcacgcatgctgtgactgggaggggggcactgtgacatatctgtgcagtctatgcagggtgtgggagccagtgggtgagtctagtaggttgtgcctagctgtcctctagggaggtggtcaccaggagatggtgtatgaagtagattgctggatcatctaccttgagaaactgagaggaggtggagagttgagaactggaaacagtgtcaagggtgactaagccctgcttctggtatgagaaagtccaattttatattatattcaatac

SEQ ID NO: 688 - DNA, 1740 bp, Homo sapiens
gaggtcaggcgatcaagaccatcctcactaacacggtgaaaccccgtctctactaaaaataaaaaaattagctggggaatggtggcacacgcctgtagtcccagaggcaggagaatcacttgaacctgggaggtggagattccagtgattgtgccactgcactccagcctgggcgaccgagtgagactctgtctcaaaaataaataaataaataaataaataaataaataaataaagcacttaggccaggtgcagtgactcaagcctgtaatcccagcattttaggaggctgaggtgggaggattgcttgagcccaggagttcaagaccagcctgagcaacatggcaaagcctgagcaaaatggcaaaaaacccgtttctacaaaaaataaaaaaaattagccgggcacagtggcgcaggcctgtagtcccagctgttcaggaccctgaggcagaaggattccttgatcccaggaggtcaaggctgcagtgagccctgttcttgccactgcattctagcctgggtgacagagcaaaagcctgtttcaaaaacaaacaaaaaaagcatttacattttaaaaatcatagttcttccttcttaaaaatattcataggctggatgcagtgcctcatgcctttaatctcagcacattgggaggccgagatggggggactgcttgaggccaggagttcgagaccagcccaggcaatgtgttgagacccccatctctttaaacatcaaaaataaaaataaataaatagctgggcatggtgattcgtgcctgcactcccagctacttgggaggctgaggtgggaagagcgcttgagcccaggaattaaggctgcagtgagctataatcatgccattgcaccccagtctgggtgacagcaaaaccctgtctcaaaaaaaaaaaattacagagctacttgtgcgtttacaaaatatagtatttgataaaaatatttctcagaattgcacaagaaggaagacagggaccactgataagacaagggtgtaggatattaaccagacttggcttctttctctcctgcttcagcagaggctggactctccttattttcagtttctccattttctgcaggaaaatctttactttctggggcagctactttggcctgtttgtcttatacttttctttgcattttttcatttgtttgtgtgaagatttatcctttcctgctgcctgttttggatttgttttcacttttgtaggggcggttttagctgataacctcaccagtcttcacttcggctcttccttcgctgccccttcagctgcggggaacttgctctagggcatcttggcaggagggagggcgtctgagggtactggtgcctgcagacttcaagcacggagagacttcttgaagcggtgctgcctggccacttggaaaaaggtagggagaaatccacatggaagaaagtagggagtaatcagaaagtccaaggtgggatgtgaaattacagagcccttgagagcctgtttggaggttctaacaggggagtgcagctactcatataccctccatcgaagagtgatcctcctctatcagagtaggttgtcctttttgacggagctcacagcttcaggaggaaggggacacctggctagtcagacagatcaaaaacagagctcttaaggttctcaaaagcatctttggatagggggtcctgggcgaccaggtgggcatatggggcaaggcagttacagagagatc

SEQ ID NO: 689 - DNA, 559 bp, Homo sapiens
gagatatattgttgtccagatatattgttgattgtgaaggaaaacaaatacttggaatcttaatgaaaaaggatgctgaaaaaatctgaacgcaaattgatgacaggtgaaatattagattttggaagggatcacagccagcatagtattagggttgggcatcaggggaaatctgggtttgacagttttattgaaagctctcagatcttggactggctgaaaatcctcttccgtttggctttgtagtggccataatgggagtgttgcctaggctagaagtggggattagcctttttttgtctaataaatcttgggttattgggtggagcccttcaagtccccatggttttaaatgattttgggcagtttggggaggagcgtgggaagatctgtttccaccttaaggaattctgcgggccgtgtaccagtggagtttgttgcccacaaaggaaggattttgtctaacagtcgatgtaagtccttagcagagcattgctaggttgaagggggaagaggaactcagagaagtcagacaaagccattaggggacagacatggc

SEQ ID NO: 690 - DNA, 1475 bp, Homo sapiens
gcgaccaggcattgatattatttttttgtgatgtgtgaactccaccctgagaccatttatcatgttctagtggccagagcagaggttttttggggaaatcagtacccaccctgaatgctccttccttgttttctccagtcgatgacgatagtttgccacagtttcatccctttgttgtatacagttttgagtatatggctgattggttttggtcagctactcaaaactgtgaagagaaaaggggatagaactgagggatgcctcccagtagtttctctcttatttctttcagtcttcagaaggggtcagggataggctgagaaaaaaggtccccggaaatggtggtccatttggttttttttaaaccaaaaggcggcatctccaggttcaaccaagagctggttacattgctataagtcagggagagtatgaccccaggacaattctgaattgttcagtaaattttccttttcctttcctttcacgggtgacggcatataaatcagaccaagaccgaagtttaaattatgtctctttcctcagtctagcttgggaacaggggcctgctgtaccctggcttcatctgtaggagatcagggcccaatgaatcttaaggttacagggagttgaggggcattgaggttcagttggcagaggacattctgggagagaaggatgcaggagagagctgggagcaggatatggaattgctatggggttttctgggttaaaaacatgtttctgaaggcatgatgtaaaagcctcagtggtttgagtgaggtatgaattatttcactgttttttggcgtcttccttaaataagcagaccatcatgcatctgagaattttgttcctttttgttctgggtgtccctttaggtggattaatttggggatatccgaggagccccagagggccattgtaattcaagatcttcagtaaacttctgccgcggagaaagaacccggccagtattgggaccatcgtggtgacgcaggattggaggaacaggggtttcggttgactgagaagttcctgtgagagaaacaggctcaaatagagagaatagaaagatgtcgtgaggagccaggaaacaaaattttccaggggtcagggaatgaattctaatcagaacaaggagccagcaagaacttccagcctaggaggtacttttcaaaagaagcctgggactctaacccagcttctgagagtatactcagaattgttaagaatcaggcagggcgcggcggctcatgcctgtaatcccagcactttgggaggctgaggcgggtggatcacttgaggtccggagtgtgagatcagcctgactaacaagatgaaaccccatctctactaaaaaaatacaaaattagctgggcgtcgtagcgcatgcctgtaatcccagctacttgggaggctgaggcaggagaattgcttgaacccaggaggtggaggttgcagtgagccaagatcgc

SEQ ID NO: 691 - DNA, 346 bp, Homo sapiens
gattctccactggatacccaaactgcaggaggtaggtggttcccatctggacccgagttgcctaccagaccattgtcagaaacacagctggacgtgagttaaagtggtgaaaaaacagattttattcagtaactactgaaagtagggaaggagctgagcttattccgatttcggcagaggtgatttgggtgttttaaagaaagaatgagggagacgggaataaaggagctccgaagtgtcggggaagtgaaaaagtgcaaaggggagcttccggatagcgaagcacgtggaggttcctggagggtgtcctcccagagaggacgtggaaccttcccgctcccaccgc

SEQ ID NO: 692 - DNA, 458 bp, Homo sapiens
ggattcaagcaattctccctgcctcagcctcccgagtagctgggattacaggcgcgtgccgcactcccggctaattttttagttttagtagagacggggttttgccatgttggccaggctggtctcaaactcctgacctcgtgatctgcccgcctcggcctcccaaagtggtgggattacaggcatgagctaccatgcccggcacattttttattatacccacaattcccaagacatgggaggcaggcatactacacagggccacacaggaaagtgacaaattggggtgaggaagtgtagagagaggggaactgctggcagagcctttattatgatattttcaggaaagaatgggcaaaacaaagtaagcaagtggtgcaaatttaggattagatagtttgcatggtttcagcgaattctgagttatagggtgggtccctggtggtctagtacctggc

SEQ ID NO: 693 - DNA, 466 bp, Homo sapiens
ggtgttttgctcttgttgccaagggtggagtgcagtggcgcgatctcggttcacagcaacctctgcctcccaggttcaagcgattctcctgcctcagcctctcgagtagctgggattacaggcatgcaccaccacgcccggctaattttgtatttttagtagagacggggtttctccatgttggtcaggctggtcttgaactcccgacctcaggtgattcgcccgcctcagcctcccaaagtactgggattacaggtgtgagacactgcgctcggccagtaatatcgttttcatattgatgacctcgttgtctaaaaggcaatagtaattctttctttaaagttaaatctctagaggacataaactttggatgatttttgaatttaagaaagaaacaagtgtgacgttcatagcattttcagccccaattatcaacagatgttaaaagcactctttgagggctacc

SEQ ID NO: 694 - DNA, 437 bp, Homo sapiens
ggctaatttttttgtattttttagtagagacggggtttcaccatgttggtcaggctggtcccaaactcctgacctcaaatgatccgcctgcctcagcctcccaaagtgctaggattacaggcatgagctaccgcgccctcccctcccctcccctccccttcccttcctcctttcctttctctctctcttttttctttctttctttctttcttttttttttttttgacagtctcactctgttgcccaggttggagtgcagtgatgcaatctcagatcactgtagccttgacctcctgggctcaagcaatcctcccacctcagcctcctgagtaactgggactgtagtcatgagcgtctgcacccagcctgcctttttttttttttcttgagacggattctcactctgtcttcaggctggagtgcaggagcaccatctc

SEQ ID NO: 695 - DNA, 656 bp, Homo sapiens
gccatgttggccaggctggtctcaaactcctgacctcaggtgatccgcccacctcgcgctcccaaagtgctgggattacaggcgtgagccaccgcgccaagcccagagctcaacttttatgaatcactttttgaatcagttgtccatggctgtagctttccaccaaaagtgttggtgatgcatctaactttaagaatgctccagctgggcacagttacagctcatatctgtaatctcagcactttgggaggtgaatgtgggaggatcccttgaagccaggagttcgagaccagcctgggcaaaaaagtgagaacccccatctctacaaaaagtaaaaaaattagccaggcatggtggcacacgcctgtggtcccagccactttggagactaaggcaagaagatcgcttgagcttgggaggtcaaggctgcagtgagccgtgtttgcgccactgaactccagcctgggtgacagaaggagaccctgtctcaaaacaaaaacaaaaacaaaaacaaaaaacagagagggagagaaaggaaggaagaatgctgcactattgtatgcaggattttcttccaagcagctgatcttattctgcaagttttgatgctggcaccttcttgatctcacctgaatatgtcaattttgtgttttcac

SEQ ID NO: 696 - DNA, 216 bp, Homo sapiens
gtgtccaatgcgtgtgccctgggcaaactgaaggcctgtggctgtgatgcgtcccggcgaggggacgaggaggccttccgtaggaagctgcaccgcttacaactggatgcactgcagcgtggtaagggcctgagccatggggtcccggaacacccagccctgcccacagccagcccaggcctgcaggactcctgggagtggggcggctgcagcccc

SEQ ID NO: 697 - DNA, 112 bp, Homo sapiens
ggaacggcgctcgcccatctctcaggaccgactgacccgtgttcaactgctgtttcactggacgccgccagaacagcgacgctttccaaggcacgggcccctctctcggggc

SEQ ID NO: 698 - DNA, 101 bp, Homo sapiens
gcggtaggggcagagagtgaggggggtaccattcgatggggaggccggggaaggcaggggtgccgaggggcccccagacctggatgacgtcagtcaaccac

SEQ ID NO: 699 - DNA, 182 bp, Homo sapiens
gccgccagcaagtgcacagggtctccctgatggatcgggagacgcagaccgatggtgaggggtcggcgcggggaggggggagccccggggcggagaacgctcaaacacgcagccctggaccccgaccctgccgccccgcggggtagaggacaaagccccggagtcacggcctctctcctggc

SEQ ID NO: 700 - DNA, 218 bp, Homo sapiens
gcctgcctggagccctacaccgcctgcgacctggcgccccgcgccggcaccaccgacgccgcgcacccggggccgtccgtggtccccgcgttgcttcctctgctggcagggaccttgctgctgctggggacggccactgctccctgagtgtcccgtccctggggctcctgcttccccatcccggagttcccctgctccccacctccagtcgtcctgcc

SEQ ID NO: 701 - DNA, 597 bp, Homo sapiens
gcagagacaaagtatagagaaagaaataagggggcccaggggaccagcattcagcatatggaggatcccaccggcctctgagttcccttagtatttattgatcattcttgggtgtttctcggagagggggatgtggcagggtcataggataatagtggagagaaggtcagcaaataaacacatgaacaaaggtctctgcatcatgaacaaggtaaagaattaagtgctgtgctttagatatgcatacacataaatatctcaatgccttaaagagcagtattgctgctcgcatgttccacctccagccctaaggaggtttttccctatctcagcagatggaacatacagttgggatttataccgagacattccattgcccagggacgggcaggagacagatgccttcctcttgtctcaactgcaaagaggcattccttcctcttatacgaatcctcctcagtacagaccctttacaggtgtggggctgggggacggtcaggtctttcccttcccacgaggccatatttcagactatcacatggggagaaaccttggacaatacctggctttcctaggcaaaagtccctgcggccttcc

SEQ ID NO: 702 - DNA, 212 bp, Homo sapiens
gttgagctgcccttttcagtgggggagaatccagcatattttccagggagggcgtttccggaagcctgtctgcaccccctttgttgttgttttcgaaggtctggggtgctgctgtgagccgggatcgcgtatctgctcctgttctgacgagactgctcctgctggaagttcagcctggtgaacctgatttgggaggggatggtgtgattggc

SEQ ID NO: 703 - DNA, 298 bp, Homo sapiens
gtctgttggggaaccacggagtggaatgacgtccaacacagctcctgccagaggaggggctgttaagtggcttccaaaacaagctgaggttcagaaacacagccccgtgaggctgactcagtgttggggccattcacattcttcctggatgaggtcgcgtcaggcagtgctcttttctcctccacccgtagcttacagatgtggggtgcctccctccagctgagggagggagtgttttcacgcacgctggccggccctgtgccttccaaggggtcgtttgaactcaagtgctgcagtc

SEQ ID NO: 704 - DNA, 365 bp, Homo sapiens
gcgggcctgcgtgatcagcatggggctcctttaccctctggcttcgggctgggatccgtcaatggggattcccgggcagaggtcagagagagaggcaggagcacagggtctgggcttgcgcgtctcctgctttcttatgcgggagacatctgcttccctcacgggcatcccattgcccttccacaccaagtgccttcccctgggctcctgttcctctcccctcctctcattccttgcggcttctgggtggtaacagcagcaaatggtgccacacggttgcccaaggactgtgaaggtggctagttgcaaaggtgtaggttaggtggtgggaaccagaatggggcttaccaggtgattgcaacccc

SEQ ID NO: 705 - DNA, 295 bp, Homo sapiens
gtctgcggctgcaggtaggggaggaggctgggaggaggcccttccgcacttccaagctgatcagcgcagcgtgagcgccggcgtgcgagtgggtgccgcgtccagacggtttccatttccccggataaccacggaaaacatgaatcaggagggccccgcgctggcccagctgcagtgtgggggcacacgccggtgagtcacaggctgtgctgccagcgctgtttttcacatttctgtccagggaacagtttctcactggacgttcagttttttcagtcctctcttcccccaggac

SEQ ID NO: 706 - DNA, 681 bp, Homo sapiens
ggtgctcaggcagcgcgggtggaagacgccggtgagaaccagcagctgcttcagaaaaaccgctgcgtgcagcaccgatgggaggaagccacctaaaaacggaaaggaatagccccaggagaggcgtctccagcaggactgcgtttttgtaaagcccgtggtggtctccccaggtcctatgcgcgagcgccccggggattccccacctgccctggagccgagaggccaaaccaaccagcaatcacaacaccggcctacacttcaaaacttgtccttccaggccccttccttctgacgtgtgtgcggagggacggcagggcgccaccgtgctggccgtgcctgatggagcagcaaggcggcagggagcgcattctgatctccccgtgtttcggagtttgtaggtcaagtgtgcactatctgcagtcagccagagcggaggaggaatttgggagaatgcatttgccgcaggctgaggcgtttgcgtttcttcctctttcctgagctatcccagtgcagtgggctccagacaaccctgtagcaccacggaggttctgagtggactttcctgcacccgccacccccaccccatcagaggcggtcgtccaggctgccgggctccagctaccgggctcagccgccttccagcccaggagtcccgcctgccgcctcccctccgccgcc

SEQ ID NO: 707 - DNA, 272 bp, Homo sapiens
gcctccaagcctcctgtgccagccccgtcctgcgcccctgtacctgggctctgtgacggtgaagccggcgtcctcacagtcgcagcagcagcacaggctgagccttccccgtgtgcggcatcacccagctctgtccttcgtgcctcccgggagcccagggagtcggggccaccggacgctggacctgagaacctggacccaggcccggtctgcccgggagttggcaagtgctgagcactgtgtccccttgcacggccactcggggcctccac

SEQ ID NO: 708 - DNA, 88 bp, Homo sapiens
gcagggccggtggggagcaaaaggcagcgcagggcccgtggcccagcccccacctgatggcccccacacgccccagggccccgcgcac

SEQ ID NO: 709 - DNA, 48 bp, Homo sapiens
gcccccccgcccccgcccccccgcgcccccgcgcccccgcgcccccgc

SEQ ID NO: 710 - DNA, 1281 bp, Homo sapiens
gaagcaagcatgtgcccacagctgttccctcactgttccctctggaatcctcccccaaccctgatccgcatctgcgtggcacacctcctcatgctgtttcagctttcttcataccacttatcaccacctgactttttaaaatcactatctctctttttatctgtctgttgtctgtttctctctctagaatgtcaattccatgaagccagggacttggttttgctcactgccttgtttctatgtttagcacaatgcatggtgcacagtgagtgctcataaatgcgcgttcaatgaattgatgaaaaaggggaaacagcaagggtcagagcacagcgcccaatcacatgccccttcaccagcttcctcagggtgagtcagccagcagggagtgggaatgcatctctcccttgtacaaagagtttgcaggtccattggccaagctgtgttttctatcttcagatcccctctatctgccaaatggggctggactggccagtctccaagggttctcccagctctgatgttctgggatcccacatgcaaatgttcatttctttgacagggctgctctctttcccaagggcaggagagctggtctggcatgacaccagtatgctgttgtaaaggtgaacagtgtgttctcagggctcggtgcctgcaggcagagagccagctcccctccaccattgcctctccattcggcacacatgctggcctctcaccatgccccccacccctgtccctggctccttcccttgccctctcactcagtctttcagaagccagctggacagctctcagggtccttgggaagatgggtgctccccaggagaggtggtgaccttggctcgggccaggctccagccacttcctccttcatctcttctcccttcttccatcttgactgttcactcccatcccttcctcaccctggagtgtttcaaagggagcaagttccattatcacatcctggagcgggtgcttgtgggcggtagtagtactggttagagctgtgtttctccaagtgtggttcttccgtcagcatcagctgagctcattaaaaatgtgaatttccaggtcccaccgcagacctcctgaaccagaaactcttaatggtgcccagccaactgtggttaacaacacccctggctgagtcagatgcctgctcaagtgtgagagcccttgatgcagagtagcagcagggactgaagaccagagagacccccctccttctttccctgcatcatcagcccaccccctccctgcagcacacaaacatgc

SEQ ID NO: 711 - DNA, 462 bp, Homo sapiens
ggccttgctgctatggaaaccagcactcagaaaatgctcagagatgatccattctggggagcggcctggccttgggggagggggaaaggccaaactctgcaccttggactttgccctcccattaccggccatgtgatgctgggcaagtcacttaacctctctgaaccctcctctccctcaccgggccccgagcagcagcctccattatcggtgggtgataaccgccgctgatgactgaacactgctctgcggctttcaagcctgaagacacgccaaattgccatttgctttcattactgcgagcttgaaatattctagtgccagcttgctgcatgaccctgtgcctccgagggccaccaaactatttccatgatagaattccctctcgcagaggtgcagagtccactctgagtcactctacaacacacacacacacacacaccacacaagcacacacacacc

SEQ ID NO: 712 - DNA, 913 bp, Homo sapiens
gatgccccaggcctgagcccccaggagaggaggctgcaggaagagggggcaggcaaagtctgtgtgcaggaggctcccttgccattcccaggagggcaagccgcagcctgggtggctagggagtttgagagcaggaagatctgaggatgtacatccctgcaatttgctttaaaattgaccagctggaagtgggagattcaggagaccacccccccccacagggcccaggctggagatgacaaggacctgcattaagctgtaaggaaacaaagtaccccagggtgcagggggaagtgggagagggacagaggagcatagggaacattggcaaggagagcatatttgaggaggaagttggagtgctgtttgtgatgctgggcagagaggcttataacaggagcctgtgcgttcccccaaacttcatccctaactacttgttccagctcttctgtgactcctgaactatgactctagccttggcaccccaagcaaggctcataaatgtttcctagcatctcagaatcccaggggttttcagcagaaatcctgaagtagtccagctgttgctcatctcatttttggggggtacctcccactgtttgttttttttgaatgttctggttttgcttttgtctttacctggtctggccctgtcatccccagccccgagaaaaggtctccagaaccgctgagaggtcagggctggcccaggaccctcacagctcccagtgagatctgagcctggtacctgtgtcagcagcccatgtggggccccagccaagctgctcactctggtgctgtctccctgttgtgtctcccaccaccttccctgctgcgcctgcccctccccgccccgccccggagtcatgccctctagccccccgctggcggctgcctcctccatgtccctccc

SEQ ID NO: 713 - DNA, 262 bp, Homo sapiens
ggaggccttgcctcgctcgcgcttgacgcccgcctcgaggctgcgcgtggtgctgcgcgcgaccacgtacacgcggcagtacatgaccacgatgaccgccatgggcaggtagaaggagcacacggaggagaagacagcgtagcccgcctcctcggtgataccgcagaagcgctcgtcagggggcacgggctccttccagcccagcaggggccctacggacaccaccagggctacgacccagagcagggccaggatggcggcc

SEQ ID NO: 714 - DNA, 469 bp, Homo sapiens
gccggggtctctaatgctttacgagcggcccagaccccaggacttcaaatgacttccccttcccctctaccccagttgtcttcaaaacacgtaaattagttatccagctgaaaacatgcgaatcttcggatggagaacattatggtatcagttttatgtcctgggtgtcattctaaaggttcgataagaaaaacctactgaaataaacccgagttgccaggctctaagcaaatttaagtccaaatgactaatacatctcttaatcagaaggaattataggagaatgaggcgttcttcttgccgaaaagattttccacctagtaaattatagcctgttatcctctagggtatttttctttaatcttcttaagccattttccagtgtctgaaaacaatttaaatattccaggtagtgaatccaattacttagctgagtgcgtctgtgtctatattttgtccagctggaagc

SEQ ID NO: 715 - DNA, 168 bp, Homo sapiens
gttgctgactttctccctaggtttctttctcctccttactgattttgggttttgtttctgattcgcccacagctggcggatttttccccatgaatggcgacaccaattaggaactcgcgggaaaccccgttgctccctttcccctggctggcagcgcggaagccgcac

SEQ ID NO: 716 - DNA, 290 bp, Homo sapiens
gtagattctgcagtatttataacttttttggttctgcctccagctttctggggctgtctggtggcagaacagtaagaagggagggaaaggaaacgtaaaccggttgattccaaagtccgtcctggagacacagtgcagccataggcaggctgggctcgcaggctgtgctgagctgcagctggctgggactgcacagtgagctgccggacatgcaacaaagcggctgggggcctcgaatgggcacttcgccttccagaagtgtgtcccttgccagggttattcacgctccc

SEQ ID NO: 717 - DNA, 430 bp, Homo sapiens
gcccacatactggaggatcaacattatcatggcaaccctgaggaggctgtgagagtctctggggtccttgccggcctgcagaaaatcaagctttgagcgggaagcttcgaggagacacagtgtcacaattacaaggtgagaccagatgccctggccccgctgtctcctcgcaggcaggagaggtttgggaacacccacgcttccctcagcaaggcagaactgcactggacgcatggaagtgtgatttggaaagcgggaccttcgtacggaatgttcggagttgtagtatctgttctactcccagcctgttggttctagggctgcggactataatcccagcatgcactgggtttgggtaagagactgaagcatccaggtgaagaactggcattgcttctacctgtggagagaggacacctgtaggctgcac

SEQ ID NO: 718 - DNA, 252 bp, Homo sapiens
ggcgcgatcccggctcactgcaacctctacctcccgggttcaagcgattctgctgtcccagccttccaagaagctgagattacaggcgcccaccaggcccggctaatttttgtatttttagtaggggagcagtcgggctctggactacatttcccggaggattctgcaggccaataccacgtctcgcgagatttcggcttcctcttagccaggtggcagattctttcgctgtgcccaattagctgctgccgc

SEQ ID NO: 719 - DNA, 3163 bp, Homo sapiens
gattttatccttttttatggccaaatgtgcatatgatatagtttggatatttgtcctgacccatatctcatgttatattgtaatccccactgttagagatggggcctggtagggggtgtttaggtcatggaggtggatccctcatgacttggtgctatcctcatgatagtgaatgagttctcaagcttcctgactagtcaagcatatgttgacactatgctccctgtgcagcccatggaaccaggaaccaattatgtctcttttcttttaaattatccaatctcaggtatttctttacagcaatgcaagaatggccaaatacagcatatatgccacattttctttatcgattcattcattgttggacacttaggttgattcttggctattgtgaatagtgctgtaataaacatgagagtccagaaatctctttgacatactgatttaatattctttgaatatatacccagtagtgggattgctggattatgtgatgtctatttttaatgtttttggaagttatattgttttccgtagaaattgctctaatttacatttccaccaacagtgtatgaacattctcctttcttcacatccttgccagcgtttgttattttttgactttttcataaaaagcattctaagcagggtgagatgatatctcactgtggatttgacttgcgtttctctgattattagtgatggtgagtattttttcatatacctgttggtgatttttttgtcttatttggaaaaatgtctattcaactctcttgactattttctaatccaattatttgtgtttttgctattgagttgtttgagttttctataaatttgggatattaaccccttatcaagtgaatagtttgcagatattttctcccattttgtaggttgtctcttcactcttgtgattgtttcctatgcagtgcagaagtttttatttagagtaatcccatttgtttatttttggttttgttgtgcatgtcttttgatgtgtttctaaaaagtccttgcccagaccaatgacatataacatttcatttaagtattcttctactagtttcatagtttggggtcttacatttaaacatttaatttattttgagttgatttttgtatattatgagagataagggtctactttcattcttttgtatggggatatgaacttttccaagcatcatttgttgaaaagactgtctttcccccattgaatgtttgcacctttgtcaaaaataagttgcatgtaaatgtgtggatttatgcctgggctctctatttttgttccactggtctacatgcctgtttttatgccaataccatgctgttttagttaggatagctttgtaatatattttgaaattagatagtgtaatacctctagcattgctctttttgcttaagatttatttggctatttggggtgttttgtagtttcacatgggttttaagattttttttaatatctgtgaagaatgaaattggaaatttgatagagattatattgtatttgtagattgattcgagtagtatagtcatttcaacaatattaattcttctagtccatgaacatgggatatctttctatttattttaatttttttaattgtttttatcaatatttaataattttcatctttccatggcttaacttacttgtaggtattttgtttctttaatagctattttaaatgggattactttcttgatccctttttcagatagtgtgctattggtgtatagagatgttactgattttttatgttgcttttgtatcctgaaaccttattatattcatttattatttctgattctcagtggtgtatttagggttttttacatatatgatcatgtcatctgcaaagagggacaatctgactttttttttccaatttggatgccttttatttctttctcttacctaattgttctgactaggacttctagtactatgttgaaaaaagtgattaaagtgaacatccttgtcttgttccagatcctagagacaaaactttcaagttttcaccattcagtgtaatgttgcctgtgggttatcacatatgatctttattttattatgttcttttataactaatttgttaaaaggtttgatcataaaatgatgtctaattttgtcaaatgcttttctgcatctattgaaatgattatatgttttttatccttcattgtttaatgtgatgtatcagattttattgatttacatgtattagactatccttacctctccatgtaaataccacttgattatggtgaaaaatcttttaaatgtgcttttgaattatcattgctagaactgctggttttgaatgtttgcatctatgtttatcaatgatataggcctggagttttcttttatttgctgttcttgtctcattttggaatcaggaaatgctgtcttcatagaatgagtttggaagagttccctccttttcatttttttgaaatagtttgtaaaacatttgtataagttttttaaatgttttgtagaatttgtcagcgaaaaccaccaagtcgtgaacttttctttcttcctctatttttttagagacagagtctcactctatcactgaggctggcatacagtggtgcagtcatagctgactgcagcctcaaacgcctggtcttaagtgatcctcctgcctcagtctcctgagtacaagtacacaccactatacctggggaatttttatttttatttttagagatggagtgtcattgtgttgcccaggctaatcttgaactcctggcctctagtgattttcctgccttgggctcctaaactgtgagattacagttgtgagctactgtgtgaagtgaattttccttgactgagagcctaaatctctccttcagtctcattatttgtcattggtgtgttcacattttctatttcttctttcttcaattttgataggttatatgtgtccagagcatacgtttttcttctaagtttttcaatttattggcatataattgtttgtagtacttactcatgattccttatatttctctagagtctatcatagtatatcctttttcatctctgattttatgtgaattttctctttttttcttagtctgacaaaacatttgtcaattttaccttttcaaaaaagattccttcatttaattagtc

SEQ ID NO: 720 - DNA, 307 bp, Homo sapiens
gagctttttaactacagcaactttaatatacgctattggagctggaattactgcagctgctggcaccagacttgccctccaatggatcctcgttaaaggatttaaagtggactcattccaattacagggcctcgaaagagtcctgtattgttatttttcatcactacctccccgagtagggagtgggtaatttgcatgcctgctgccttccttgaatgtggtagccatttctcaggctccctctccagaatcgaaccctgattccttgtcacccgtggtcaccatggtaggcacagcgactaccatc

SEQ ID NO: 721 - DNA, 206 bp, Homo sapiens
gttcgctgccctcgctcctctagaagtaggactgttccaccctcagactcctaggtggcctccacaccccaacaaatgccaggaggaccagaacccgcagcatggtggcctgctgggcgcgtgctcagtgggacagcttgggtcctctgaagctgagtcacaggggcaaggtgtgtttgcgccacccacgtcccaccggagtccgc

SEQ ID NO: 722 - DNA, 375 bp, Homo sapiens
gcccacccgtgccctgccatcctcctcggcatcacgtggagcgcccagcaactaaatgtagaccccgagatctcgcgcaaaccgtggttctgccctttccaggcgggagggaggccaggcagagatggggaaaggaacggagacaaagtgagagagagggacagagggaggaaaggacggaccttggaagggaaggagggagggagggagggaaagaaaaagagaggaagggaggaagggaaggagggagaaagggaggtatgcatggtgggaaagagggaaggagagaagaacagagggagggagggagacagggagggagagagggagagaaggaagaacagagggaaggatggacagagggagaaaaagagc

SEQ ID NO: 723 - DNA, 274 bp, Homo sapiens
gcgtgggtgtcacagttgccgtgatagtctcacacatgcaggtgtgtggatctcgttcattttcatgtagacaatgagagcgaaagcacagagaaaagaaacgtcaggtgcatcacggcctgaggatggattcctgtttcctgcaaaatgcggagtctcccatatagcctgtttgaaaactggaaaggagagcaccgacacgatgctggtcttccacgctttcttggaagtttctgggtccccacagagctcgggaaacagtcaacatggtcac

SEQ ID NO: 724 - DNA, 102 bp, Homo sapiens
ggttgggaggcgccttgatggctggcatctgtgcttgacgcggaggcctccggggtcgcgagcttcggaagtggaggtgccccgtcttcgggttcccacgcc

SEQ ID NO: 725 - DNA, 53 bp, Homo sapiens
gtcgcgctgcgggtcctggtcctcttggcatttgttggggtgcggaggcctcc

SEQ ID NO: 726 - DNA, 514 bp, Homo sapiens
gggtgcctggcccttcgattctgaaaccagatgtgaatcctggactcaaggaggcccgtctctctggccagttcttccctggtggcgatgaccggaaagcgatccttcccaaaggctcagagaagcagggcggtctgggatcgggtgacggcggtccgctttcgcctgccttcttgcgggccgcgtctcccgggccagggtcgagattccggccggtgctgcctcagctggcgtgacctctcattctgaaaccaaatctggaccctgggctccggaatgccgatggcctgggccagcctttctctggtggcgatgcccgggtatgggttccgctcaaagcaggctcgcagggcctcgctttggctcggggtccaaaggagtctccttcgccgtcctcgtcctcgggcttccgcggggagggtgctgtcagaaggtgtcgggagagccatcgccgggagagcaccggccggaatttcacggacggacacgggcagagagaggccggtgggctccc

SEQ ID NO: 727 - DNA, 923 bp, Homo sapiens
gtgagtccagaacacacattttataagagcataagaaatttaaaaatagcaaagtatataatgaagtttgtaatagatattcatggctaaaatttattcttatattaatcaatatattctataaattgggagaaaatattaaacacatgaaaagtaaggaactttcatcattaatatataattaatatgacaagaatgtggtttatgtttttatctttacaagatttaggaacatttggtgcaaggaggaagaatgtataatcatggggagcatgtatgatactggagggagccttttgacaagggggaaatggcatcacgagatatgctatgatcatagctatgtaggaacacagctacctatggtctccccgtcaaatccactgggcagtgttcagttaccaacattgaggtagagctcactctcccagatcagaagagaaaatatacactgcagtcagaagccactgagtaggaagctcctttcagatagaggcaagggatatttgactttttatctctagtgtctagtacaatgtccagaacacaacagatattccatatgcacagtcacatcctatgtgtctgtatttcttttccagcagggactggaagtcctatgttttgttaatatggtgagccagtgcccacatgaacagtagcatcttagcactgtcaccagggcatccatttaaatgctcttatcttagctagtcaaagtgtggtctatgagtttgcattttaataagatccccgggtgaatcttgtgcatgttacagaggaagcactgtcctacatcccatgtgacaggctctcatagtcaccatcatcacgggaatcttgcccatgttacagggaagtgctgtcctacatcatatgtgacaggctctcatagtcaccatcatcaagggaatcttgcacac

SEQ ID NO: 728 - DNA, 817 bp, Homo sapiens
gagtgaccctcttgccttggcctctaaaagttctgggattacagacaggagccactgcaccaggctactttgtataatttttaacataaacataaatattttgagaaatagatatgttaaaaccattggaggaaaatatattgtaaagtatacaatagaaaaaaaaacaaaatacaacaaatacaacaaaaaattatcaaaattttcagaggaacaaaacaaaatctagttttacaatcttcagaattcaatcccattataacaaatgtataaagaaacatattcaaagaaaaaggcaatcaatagagactgacctcgagatgacccagatgttggaattagtgtggatttttaaagtagttattgtaattcttactaaaatcaaaaccccaaaaacccttaaaataaatggataggaaatcacagcagagaagaagaaactacaataataacaaaggctcaagtggaaattctagaagtgagaacgttttcaaaattaaaaaataataatcagttgtgttcaggagcagcttggaggtggtaaagagtcaatgaaccttaaaatacaattgaaatgattcaatctgaaaaatgtgagcagtcataggttggggtgagggagcttttcctttggttagtgcttttaagtaatcttggttttgataagattactagactgatccgtcagtggcatgctaagccagagtttatcttggtttcagtagtgctttaaacaaaactcctgatatccttgtgtacaagatggaagaagagtggaccagatgacaatatttagatgaagtcattcttaacctcc

SEQ ID NO: 729 - DNA, 32 bp, Homo sapiens
gggggcgggaagcggcttaggctgccctcgcc

SEQ ID NO: 730 - DNA, 2841 bp, Homo sapiens
gcacacagcacaaagtagtttttcagaaaccttctgtctagtttttatgtaaagacatttcctatttcaccataggccccaatgggttcacaaatatccctttgcagattctacagaaggactgtttccaaacttctcaatccaaggaaagtttcaactctgtgatgtgaatgcagacatcacaaagaagtttctcagaatgcttctgtctagtttttatgtgaagatatttcctgttcaccataagcctaaaatactgcaaatatccatcttcagattctacaaaaagactgtttccaaactgctcaatcaaaagaaaagttcaactctgtgagaggaaaacatacatcacaaagaagtttctcagaaagcttctgtttagtttttttttgtgaagatattccctatttcaccataggcctgaaagggctcacaaatatccttttgcatattctacaaaaagactgcttccaaactgctcaatcaaaagagaggttcaactctgtgtgatgaatgcacacattacaaagaagtttctcagaaagcgtctgtttagctttcatgtgaagatatttcctctttcaccataggcctcaatgggcccagaaatatccctttgcagattctatgaaaggactgtttagaaaactgctcaatctaaagaaagtttcagctctgtgagatgaatgcacacatcataaacaagtttctcacaatggatctgtcggctttttatgtgaagatatattctttttaaccataggccttaatccactcatgaatattcctctgcagatactacaaaaagactgtttccaaactgctgcatccaaagaaatgttcatctctgtgagatgaatacacacatcacaaagaagtttctcagaatgtttctgtctggttttcatttgaagatatttcctttttcaccataggcctcaaagtgttccaaatatccatttacagactctacaaaaagagtgtttccaaagtgctcattcaaaagataggttcacctctgtgagatgaaagcacacatcacaaagtagtttctcagaaagcttctgtctagtttttatgtgaagatatttcctttttcaccataggccataaagggctcacaaatattttttgcaaatactacaaaaagactttttccaaactgctcaatccaaagaaaggttcaactctgtgagatgaatggacacatcacaaagaagtttctcagaatgcttctgtccagtttttatgtgaagatatttctttttcaccctaggcctcaatgggctcagaaatatccctttgcagattctaaaaaaggactgtttccaaattgctcaatctaaagaaaggttcacctctgtgagttgaatgcacacatcacagagaagtttcccagaatgcttctgtctagtttttatgtgaaggtatttcctttttcaccataggcctcaaactgctcacaaatatccctctgcagatacaacaaaaggactgtttccaacctgctaaatcaaaagctagcctcaacaacatgagatgaatgcacacgtcacaaagaagtttctcagaatgctttcatctagtttttatgtgaagatatttcctttttcaccataggcctcaaaacactccaaacatccatttgcagattccacaaaaagactgtttccaaactgctcaatcaaaagaaaggttcaactctgtgagatgaaagcacacatcaaaaagaaggttctcagaaagcttctgtctagtttttatttaaggatatttcctatttcaccacaggcctcaaaggaatcaaaaatatccctttgcagattctacaaaaagactttctgaactgctcaatgaaaagaaagtttcaaatctgtgaggtgaatgcacacataaaaaagaagtttctcagaatgcttctgtgtagtttttatgtgaagatatttcctttttcaccataggccataaagggctcacaaatattttttgcaaatactacaaaaaaactttttccaaactgctcattccaaagaaaggttcaactctgtgagatgaatggacacatcacaaagaagtttctcagaatgcatctgtccagtttttaatgtgaagatattttttttcaccctaggcctcaatgggctcagaaatatccctttgcacattgtgtaaaaagactgtttccagactgctcaatgaaaagaaagattaatctctgtgagatgaatgcacacataaaaaataagtttctcagaatgcttctgtatagtttttatgtgaagatattttatttttcaccataggcctttaactgttcacaaatatccctctgcagatactacaaaaagactttctccaaactgctccaagaaaagtaaagttcaactctgtgagatgtaggcacacatcacaaggaaatttctcagaatgattctgtctagtttttatgtgaagataattctttttccccataggcatcaaatggctcagaaatatcccttttcaggttgtacaaaaagatggtttccaatctgctcaatcaaaagaaaggatcagctctgtgatatgaatccacacatcacaaagaagtttctcagaaagcttctttttagtgtttttgtgaagataattcctttttcaccataggcctaaaagcgctgcaaatatccatttgcggattctacaaaaagactgtttccaaactgttcaatcaaaagaaaagttcatctctgtgagatgaaagcacaaatcacaaagcattttctcagaaagattctgtcttatttttatgtgaagttatttcctatttcaccatagtctgtaaagggctcacaaatatcc

SEQ ID NO: 731 - DNA, 47 bp, Homo sapiens
gccagcggccttccagcaccaaggcggccccgcgcggcacctggagc

SEQ ID NO: 732 - DNA, 74 bp, Homo sapiens
ggtacccccaaaggcacacctttcggatcgctagagaaggctttcgcaccgagggtgattcacactccccaccc

SEQ ID NO: 733 - DNA, 61 bp, Homo sapiens
gcttgtcccgacgaggacccgcccgtggccaacgggacaggaagggcctgctttgccccgc

SEQ ID NO: 734 - DNA, 168 bp, Homo sapiens
ggggtcagggccgcccacgcgggaaaaccaacggagccctgagacgtgtttttttttttttcttggattggttggtttctttggaggtgcgtttcatatggtccttcctttgtttgcttctttctgtctccttgatgcggtgggccccgagatttgtagagtgcaccc

SEQ ID NO: 735 - DNA, 2041 bp, Homo sapiens
ggagcagcagcagattgtcaaaaaggaaatcaagaaggagcagccaaagaggttgatggagaatcaggagaaagaaggtgacactgaagccaagggaaggaaagtgttacaacatttctgggaaaaaatgacatgctctgtcttaaccttgctgttttatgagccatatagccacattccaggttctgagaagtccagcactaaagatgtttcttttagtttgcttaacccaacatttgccagaataatctgggctcagtgtgagggtgtgtgcatgtatgtgcctgtgtgttctactagtatctcactgaggctagtgctgtatacaacataatttttaaaacactggttttatccatctttatgttcagctgcagcaacatttacaaaggtcaaatttgatcatgtgtcttcattactaaaggaaacaaaacaaactaatgaataaagcccacctggcagtggctcctcactacctgtatgacggagcacacctggcttggtctgggtgccctgtgcttacctggccgtgctgtcttctgcctgttgctttgcctcccctttcctcctggagaaggtagagatgctctgagctttggcccgtctggaacatgtgtccttcccctcatgtggcccatgttttcctgagtccactttaatctcgtttaaggatatagaactttctttaaagcttttggtcaagtctcactctctatgctgtcttcctgctccttctacaatgtacatactttactgatacattaattatgctatatcagccaagggttttacttctatatcattttatatcattatcttttttcttagagtttagttcattcatttattcagtctttccacaatataattgtatgtcatataatttcatatttattttcattggcgtctatatatcttttctgtaaaaatggaggctttctaaatagatcttcattaatgttgaaagaacaaggttttaagtcttggtctcagccaaaaggagttccccacattaccaggagggaaataaacacttgcattgttgcattagatattcttacagagaaagagaaccatgtgtaatggaaaatttctaactttgcctcagggagaccagattgattcactgagaaagtctgaattggtttagaagcatagttcggagttttctagaaggacaaaagttagagtagggcataagaagtaatacccatatcaaaaaaattagaaatatctcaaattaaccacctaacatcacaactgaaagaattagggaagcaagaagaactcaaccacaaagcttatagaagacaagaaataactaaaatcagagctgaattgaaggaaattgagacatgaaaaactgatcaaaagatcacttaatcaaggttttttgaaaaaattaataagatagggcactagctagactaataaagaagaaaagagagaagattcaaataaacaaaattagaaatgatgaagggaatgttaccactgaccccagagaaataaaaataacaaccagcaactactacgagcacctctatacacacaaactagaaatcctagaagagattaataaattcctggacacatatactctctcaagactgaaccaggaagaaattcagtctctgagcagaccaattatgagctccaaaaattgaatccataataaatagcctatcaacccccccaaaaagcccaggacctgataaattaacaaattttaacagatgtacaaagaagaacaagtaccagtcctactgaaactatttcaagaaatagaggaggagagactcttccccaacttgttctacgagaccagaatcatcctgataccaaagcctggcagtgacacaacaaaagaagaaaacttcaggccagtatccttgatgaacatccattcaataatccacaataaaatacttgcaaactgaacctagcaacacatcaaaaggctaattcaccatagtgaagtaagcttcttccctggaatggaaggttggtccatcatgggcaaatcaataaaatgtgattc

SEQ ID NO: 736 - DNA, 218 bp, Homo sapiens
gctgctggcgtctaggccacaccaccctgaacgcgcccgctcgcctctgatctgttgaagctaagcagagtggggcctggttagtatttggatgggattccacctggtaatacccggtaccataggcttttggcttcccgctctctccctctttcccccttttgcctccgtgcttcccaaccgcccccgcgactctgctcccccttgaccgcccccgc

SEQ ID NO: 737 - DNA, 248 bp, Homo sapiens
gttttcctctctgccttccgttctctgtttcttgctccttttgtccctcggtccatccttccctctgttcttccttccctcccccggtttttttctccctttctccctccctctttctctcccttccggtgtccctccttccacccatcctttcctagctccatccttccatctcactctctccgttcttgtcctcatctctgcctgcctttcctcttgcctggaaagggcagcacctcggtttgcac

SEQ ID NO: 738 - DNA, 95 bp, Homo sapiens
gcggaggcctccggaggtggaggtgccccgtctttgggttcccacgccgccctggcaacctggggctccagcaccaccacggactccggtgggac

SEQ ID NO: 739 - DNA, 57 bp, Homo sapiens
gcgggaagcactgtgacgtgagaagccgctcgcgccttgcgcatgcgcattggctac

SEQ ID NO: 740 - DNA, 212 bp, Homo sapiens
gcgtggtcacatggtctccacctaggattcgcctctgttcctctttgcagttgacctgtaaagcgcggtcggctttccggatccccagggcttttagaagcggggcaggccactgctctttcaaaggaggagggaggcagagggctgatggatcagtgaatttgcagctgacaccaggccttgagacctacgggatcattctgtgctacagc

SEQ ID NO: 741 - DNA, 380 bp, Homo sapiens
gggaatgtctccagatgccaggagtcgcaaagggccgaccaccatgaggaaagcccagcggagacgggggaagcagcacaggaacccagcctcaggcctgcccggatggtgttggttggggtgagtctccccagaattcgtgcctcggtccgtgatctctaggacagttcggcctgcatgcccctgggctgctctctcgcccgagggtcgttctcatcgagagcagaaccccatagcctcagggattgcctggaggtgtgtttttcaatgccctcctcctttgaaagagcagtggcctgccccacttctaaaagccctggggctccggtaagccgacagggctttacaggacacctgcaaagaggaacaggagcaaaccc

SEQ ID NO: 742 - DNA, 1039 bp, Homo sapiens
ggccataagtgtttttctgcttccgttcgggccccccgtcttcccgggcatctctgagctcctgccggatcaaggctgtggtcatcacctcattcatctctgccgcttggcctgagcctgcacatttggcctcattcttaaaacagaggctcctggagagtcccaaaagccactaaccattcccatatgtgggatcccttctctgatcacacaaagcagaagcctgagaaaaaaagcaataaagagtggtctctggctctccttcccctcttccgtcccttgtctgggaaaggggttcccaaccccagccccaccaagagcatattaagatttcttcctcccttcctttcctatctccccctcagatgctgtgatcctgactccttctgtctccacctcaaaatatttcctcttgcattttattgttattctgttatggagggactgttaactactgttttattattattattcattatttattgttattatgattgttgttagagatttgttcaccactgttcaggggacagcagcctggcccagggggaagcctgcctctccctctctgtctctctctctttctcacacgcacatacacacacacacaccctaacacagtgcacactcatgcatatatgctcacaaatgcctgctgtgttcaggcccctgcacagcaatccgaagaggcaggcatcctaccgcagcactcaaacaacacactgcccacgcacaccagcattcaggcagaacaccacccccagaccaacgccaaaacccacacgcaccgagcttgcaaggaaaggaaaatacataaagaatcccttctctccacaacctggaggggcgagtcaggcctctgtctcttccccccagtcgctttcgctttctctttttttttttctccttgtttacagcttcagagagctcaaggcacataaatcttgagggttctacagagcgcagagcacatttgtatgcatcgttaggactcgctaatacctaagcccattaaggagcgtgtatgcgcgtggtttcc

SEQ ID NO: 743 - DNA, 644 bp, Homo sapiens
gtcccagttgtgagattgggcgcggcagggcaggcgatggggcgtgggggagggagggagcagctcggggtggtgggaggggggtggtggggcggcgaaccggacatcccatccattcacacgacacaacaccccccgacgggctcaccactcccgacccttcgcgcccatgtgcgagaaggcagaccgcccgacccgtgtgcggcagccgcgagggaccggcggccactcatgcacggagggcacggggcggccccgacgtttgggcagcgaacgagaggcggaccgctgtgcctgggttctcaccgccagcggcctccgagcatgaaggcggccccgcgcggcacctggagcggctgactggccttcggagggcctgcggctcccccaccaccgccactgtcgcggccagcccccggaaccctcttccctgcacgcactgcaggcagaccccaaaccctccgggtgcccaccacgcccactcggggtgccgccgacctggtcccaaaggcgcacgcccggggacacagacaacgggccaaccagtggccggcggcggcgccccacaaggcagagccgggtttggtcccagacggggccaccacagcctaaggcggtgagtcgctcggggagagaggatccgc

SEQ ID NO: 744 - DNA, 120 bp, Homo sapiens
gtcgggcccgcagaggtgctcagggacgcctagggaagggagagggcctgcggtaccaggaaaaatctgcgtgcggcaaccttgagccttcccggtctgggtggggggcctggccgctgc

SEQ ID NO: 745 - DNA, 68 bp, Homo sapiens
gctctggacggttcgccgcccctgccccaggagggcgctgcaggagctgggtggggaaggggagggac

SEQ ID NO: 746 - DNA, 2119 bp, Homo sapiens
gtcttttcaacagtttcaaaaagtcttaactcattccagcagtaactcaaatgtagtaaattcaagtctcatccaaaacaagaccaatcttttctgcctatgagtccctgaatgtaaaagacaattcttttctttcaagttaaaacgatggcacaggcaatgggtaagctttctcaaaccaaagggaagattttcccagaaaaataacacaaatgggacacaggcccaatccgactccaaaacccagcaggacagcattcatttatcatgagaactcactatcacacagactgcattaaggagacagtatttaaccatttgtgaaggatctgccacccatccccatgtttcaccctcactcacaccatgaatgtccattcccccacatcccccttccaacccccattctctactatgattaaatcaccttctaccaagccccacatttaacattcccaattataattccacatgagttttggtagggacacagagccaaatcatattattctccctttggacccccaatctcacaaccttctcatactgcaaaatacaatgatgcattctctacagtcccccagtgtctgaactcattccagcatttactcaaatgtccatttgtgaaggatccaccccccacccctgcctttcacccctaaccccaccacaatgcccccaaccctcctcaccccctaatcccccccacactccccaccccaccaaccatcccacctccactctccaccatgattaaatcaccttccaccagcccctacctttaacatttcccattaaaattccacatgagttttggtagagacacagagccaaaacatattattctgtccctggtcccccaaggttcatgtctttctcacattacaaaacgcaatgatgccttccctagagtcccccaaatcttaactcatcccagcatttactcaaatgtccaaagcccgaagtctcttctgggacaaggctgccataccttctgccctgagcctctgaaatacaaagcaagttaaccacttccaaggtacaatgattgtacaggcattgggtaagcattccaagccaaaaagaagaaatttgccagaaagaagcacaaaacacagatgagacttaaaaaccccctgcaagtcaaaaacccagcaggccagtcattccatcatacagctccaagtcatctttttggaatctatgtccacatccagagcacaggttggtgtgatggctggaatcccaaggccttgggcagctctgcacatgtggcattgcaaaatcttccccctacagctgacctcattggctaggctggcgttgagtgcctgtagcttttcaacactaagggggcaagcagctggtgggtctatgaaactgaggtctggaaaatggtgcctccctgtatggggactccaaccctatactttccttgtgtactgcctgagtagaggtttaccatgaggctctgactcttggaaaagcttctggctagacactcaggctttctgatatatcctctggagtccagacaaaggctctgaagcttctagtcctgtgctttatgtacctgctggcttaacactacgtagaagccaccaaggcttggagcttgcatcctctgaagcagtgatgcaagctgtacctgtacatctttcatccatggctggagctggaaaaggagctgcagggatggaggcagcagtgtcctgaggctgcacacagcagtggagccatgaggctgggccaggaaaatattcttttctcctaaaccccagggccagtgacagcaagggctgctacaaaggtctctgaaatgccttcaaggcctttttcccattgtcttgaattattagcattgggctcctttttatgcaaatatccgaagccttcttgattttccccctgaaaatcagcttttctttttgaccacttgtccagattacaaattttccaaatgttaaagctctgcttctcatttaaatataagttccaacttatggtcatttctttcatcacacataggagcacaggctgttcgatgtaggccagacaactcttgagctttgctgcttagaagttcattccaccagatacaccctaaatcatcaccctc

SEQ ID NO: 747 - DNA, 932 bp, Homo sapiens
gaggggcattgtgaggactccagccccaaggtcatctggctgagcttcctaggaagggctgacaacagacctgtcccaagacccgaagcctcaccaggctacgtgcaggctttggaccagaacatcagcatcaccttggggtgggggttgcagggggaggcacgcatcctctgctcaccagaaatgcagaattctagattcatctggaagaaattgttgaagggaaaagcaactttcaggagagtatgtatggactgctgtttgtataaaattgcaaaaacagaccaaaaaacactatccattcttcatggacatgcactctaggtattaaacatggatgggaagacacacattgacttcagaatagtgggagggaggtggtaactggactggaaaaggggcatataactcgagtgtcagcttgaacattatggctgaatctgtaatgttttcttccttaaactctggagcaaatgcatccaaaagttaccatatttgaattttaactgggaggtacatgaaagtttaataccattatcctctatgcagtcctgtgtgtttgtaatattgagccatattttttaaacacttgactcatcatgaaaggaagcttgcctacatggtaccaatggttatctttaggtagcagaattcaagactgattcttttttctttttttcctacttgtatgttatctctatttccctgtgtgaggatttatgactgttgtgatgaaaaggctagcatcctaactccctgcatcataagcacacaccatgccctggctggcaggatgaggaggagggagcgtgtcttttcacctggccagccctaggcaactctgcagagaaagacacaggcacttcccctctgcagccaaagagttaagaaggctcgatgtgaaatgaatcattccaggggagctaaatccc

SEQ ID NO: 748 - DNA, 608 bp, Homo sapiens
ggccctgaccccctgtcctagcctggcccaagcaccctccacctcaccccggcctgctcaaagtgccctgtctacctgagcagagcctccctctccaaggctctgtctttctctctctgcaactccctcaccctctccctttctctacttccccctccacctctcactcttctatcaccttctgtctctctccccctccaactttctctctctccccccatatctatctctccatcccggtctccctggctttctttcaagctgtgtctgtgtctttgtctgtatgtccttgtgtgtgtgtccgtgtgcgtgtgtccatgtgtccgtgtgtgtgtctgtgtgttgtgtgtgtccgtgtgtgcctgtgcgcgtgcacccgtgtgtatctgtgtgtgtgtcggtgtgggtttgctcgtggtggtggtgtggtgtgtctgggtgtctgtcagcccctctttcccagtatcaggctgccgggactctagtgtcagcgcggggcaaagcagggccttcctgtcctgttggccatgggcgggtcctcgttggaacaagcaacgatggtgtgggcattatgagaaaaagggcccgcggggctgggctggctgttc

SEQ ID NO: 749 - DNA, 166 bp, Homo sapiens
gccttggaggctgacctcttactttaatttctgtctttcttcctttcctgcgtttgaggagggggtgcaggaatgagggtgtgtgtggggagggggtgcgtggtggggacggaggggagcgtcctaagggtcgatttagtgtcatgcctctttcaccgccaccacc

SEQ ID NO: 750 - DNA, 57 bp, Homo sapiens
gcgtgcccctggcggtgactcgctgaatgctgcggtgtcgtccgccattgcgcgccc

SEQ ID NO: 751 - DNA, 570 bp, Homo sapiens
gtgaagagcactgagttaagcccttttcccaggttatttcattaatcctcacaacagtaagagataacactattctacagataaaagataactaagactctaagatgttaagtagcttgtccaaagtcacacagttagtaaagatcagagctaaggattaaatcagaaatgtctggcttctaactaagcctgcttcccagggtagctggcttattcgacagatcaagaaaatgaggcccagggagaggaaataacacatggaatgaagtggtgagcgagcagcagccatttgaagaaatatccctcttccttctgggtctgggtgaccagctggagaagagactggagagagtggaggaagggacagccacccagcagaggaggcaagagcatggaaaatgtctctttcagccaattttcctgaggaaccctggctgaggctcagggctgggaatggaaagtgtgcagggaggaggcgcagccgcgtccacccggagaaactgtctgcaatgtcctgccgggagaggccagggggagggaactgctgggaccgcagtgggtgaaggagcc

SEQ ID NO: 752 - DNA, 1102 bp, Homo sapiens
gggtcaggatagtgtcatcactccactgtccagccagaaggaaggagaggcatccatattccctgtccatttagctataagagaagctggaaaatggccgtgagtcggtctcgtgtccagttagaactaactcatcagggtgcgcatctgcagtcttctgttccggcaaggagaaagcattcgtatcatttctagcttgtcaagccctactgtttcagcgatcctcattggagaggaatcagcagtcgaaggaacagcgggccaagcgcagtcgtgacgtggcgttcagagagcggaagttgtcagatttcaccgggccgtaaagcgcgctggctgtgtcatcttccggttagcgacaacggctctgaccgtctggcaggccgcgtggcgcccgcgccggccttcctgcaggggactccaccggagccttgccaattccgtttgtttccctgttgtcgcccgcttcaccctggatcatgttcaagaagtttgatgaaaaggaaagtgtgtccaactgcatccagttgaaaacgtcagttattaagggcattaagagccaactggtagagcaatttccaggtattgaaccatggcttaatcaaatcatgcctaagaaagatcctgtcaaaatagtccgatgccacgaacatacagaaatccttaccgtaagtggggaattattgttttttagacaaagaaaggggcctttttgtccaactctaaggttgcttcacaaatacccttttatcctgccacaccagcaggttgataaaggagctatcaaatttgtactcagtggcgcaaatattatgtgtccaggtttaacttctcctggagctaagctgtaccctgctgcagtagatacgattgtagcagtcacagcggaaggaaaacagcatgctctgtgtgttggggtcatgaagatgtctgcagaagatattgagaaagtcaacaaaggaattggcattgaaaatatccattatttaaatgatgggctgtggcacatgaagacatataaatgagcctcagaaggaatgcatttggggggctaaatgtggatattgattgtgtcgtatgtgtgtttgtgtctgtgtgtgacagc

SEQ ID NO: 753 - DNA, 1640 bp, Homo sapiens
ggctggctaccggtgcgcggggaccacactcacaaaccgcattccggtcttcccgcccgaaaatccgcgctgtgcgagggacccacaagactggcggtctaaaagggacccgcctcacttggaaacggggctgcggtagccacaaccctccggtagcggtagcgtaaccccgttcggtgatccagccgcacagcgcaacgggtacaaagaaccccactggctaaggccgacctaccagggcttgggggaggggagcggaagactgaggtcgaaacgacctgtccagcagaaaactatccccaagcatattccaaccacttctccgtagagctcattccttccgtgcatacgaagggcgccaatccttcctgtatccctcctacagataccgggtgactactgcttttgcgcccaaagcgcagtgctctggctcagctccctacagtagcgacctccaccgcagattctcatctcctcgctaccgtaagagagatgtaaagaatcagacgggttacgcgctcaggcaccctcatgaagcagaggacctgggcttaaaactcattcagtatcaggaaaagagcgccgagcacgggcctattatgccaaagcttctgaaaggggcaccacgttttttgctctatggggcagatgacccctccctaatttcggttttccatccatccccaaggtaggctttggagtggcaccggagactgagctcaaatttgcaggccagggactggggagaagggcgccacactaagagacctgcacccccattctcgccctgtactctacccagagtcgtggtacccctccattttaaagcaaaatccaaaagcaagcacggcggaatcttctggaagggggctaagatggaactcaggaggcgggggtcggtatggaaagagcagatggattatttttttcctctcctggcgaatgaggagcgcccccagccacccctcctcataaacaccccccaaggcgcgcatgcgcacttaggtggcgggcgggtacttaaggcgcggccaccgcggctgcggcagtgcgcccaacagcggactccgagaccagcggatctcggcaaaccctctttctcgaccacccacctaccattcttggaaccatggcggcagtggcggcggcctcggctgaactgctcatcatcggctggtacatcttccgcgtgctgctgcaggtaagtctgacggggtttcgggtgggagagggttcccaactcgcgcccctagaacccgcaagactgcgtcgcgattgccgcttcccggacccgtcctattccgattgccgcgatccttgcctgcccaagtgccgctgccggcaccgcgcgccccctgcccattccctgcgccgtcctcctcgcgctgaccctccctagtgcgcccgcgcctgccagggaacaaagactcggggcgcggcgggcgaccgctgcggacgatcacccaggcatttagcgacctacgcggtaagaaaaacccgctacacccggactcgaccccaggagggaggcggggcactactgtgttgaaagactttacagctcgcagagtgaaaattttccaccttaaaaaattgcgcattgcggagaaattttatttaaaaaaacatatagcgcttgc

SEQ ID NO: 754 - DNA, 652 bp, Homo sapiens
gcatatttccttcaaggtgttcctggaatgctgcatttactgggtaggattcgcttttcgaaatcctccagggacacagcccattgcgagaagtgaggtatacctaagttgtgggtccaatcagcttgccgccatgcagctctcagcacagttggaaaagctccagctgccctgactcgtggacaagctgcgcccgcgcccgcctctccagcctacgctggatgggcgggcggggcagggggtggggcgggggtgggcacggcagcaccacagacatgctgtgggtgctctccactaagggtgggtcctgggtttctcgtcgcaggtgttcaggtactccctgcagaagctggcatacacggtgtcgcggaccgggcggcaggtgttgggggagcgcaggcagcgagcccccaactgaggccccagctcccagccctgggcggccgtatcatcaggtgctcctgtgcatctcggccagcacgggagccagtgccgcgcaggaatgtggggtcccctgtgttccctcgccagaggagcacttggcaaggtcagtgaggggccagtagacccccggagaagcagtaccgacaatgacgaagataccagatcccttcccaacccctttgcaccggtcccactaaggggcagggtc

SEQ ID NO: 755 - DNA, 1531 bp, Homo sapiens
gttttcactgtcctccacctgccttccttcacatgcctacacatgcatggccggattgaggtagggccactagactcacctgtgtcgtgtctatttgtatatctgtttacagccagttcggccaccctcggcctgcccagcagtgccctggatgtgtcttgctttccccgggagccaatccatgtgggtgccccggagcaagtggccggctgcgaaccagtttctgccaccgtcctgccgcagcttagcgccgggccggccagctccagcaccagcacagtgcggcttctggaatggacagaggccgcggccccgcccccagggggcggcctgcgggtcagtgtctgtggggattggctaagcctcgtaaaccgcagccatggggcggggcttgcaggcccggaggctggacctgagacggaagtgggggaagctggctcagatgatgggccctaggggtgggctttgagtgagggactctcggggcgtggcttgagttgaagcactcctaggccctggggactatgggggcgtggcttggagtgaggcactctgggactgggcctgtgggtgtctgggggcgtggcttagactggggcaccctgagtgggcctgtgttagtttgggggcgtggcttagagtggggtaccgtgggactgggcctgtgggagcctgggggcgtggcttagagtggggcaccctgggactggaccccgcaggtgcttgggggcgtagcctggagtgagggtttggctggtgtagcttggagtgaggccccctggcgtggagtcttgaggcctgctgagggcgtgagctggcatgaggcgaagagagggccatggcaccgactccgagatgggtcaaggacccgtacgggagtcgcaatcctcagaccctcccgcgctccagttccggataagcgagtataagccgctgaacatggcgggagtggagcagcccccgagccccgagctgcggcaggaaggcgtgaccgaatacgaagatggcggggccccggcgggagatggcgaggcgggcccccaacaggcgggtaggagccccgctccccaggccctgagctgggccctgtgcgggtggggcgaggcctgagccccagaaggttcgggggcggggcccggggtggtcctggggtggagaaggctggaggaggccatccgatgcggagatggaccgaggcggaggcagggcctgagggggcgtgggcggagcctgagtgtggctgcgatggggagggaggcctgaggcccatttggcccccgcagaggaccacccccagaatcctccagaagatcccaatcaggaccccccagaggatgatagcacctgtcagtgccaggcgtgcgggcctcaccaagccgcgggtccagatcttggttcctctaatgatggctgccctcagctgttccaggagcggtaaggggaggaggtcgcagccctacttgctctaccttcagcccccaaagcctcattcctgttcaggggttaggagaggggctgggtggtgcagggc

SEQ ID NO: 756 - DNA, 62 bp, Homo sapiens
gtgcaggctcggggcctcggagcgtgggggcctgcagcggggcggtggccggggacgagggc

SEQ ID NO: 757 - DNA, 445 bp, Homo sapiens
ggccacgccgcgccgggtacggactccggcaaggtcttctgcatgttctacgcgctcctgggcatcccgctgacgctggtcactttccagagcctgggcgaacggctgaacgcggtggtgcggcgcctcctgttggcggccaagtgctgcctgggcctgcggtggacgtgcgtgtccacggagaacctggtggtggccgggctgctggcgtgtgccgccaccctggccctcggggccgtcgccttctcgcacttcgagggctggaccttcttccacgcctactactactgcttcatcaccctcaccaccatcggcttcggcgacttcgtggcactgcagagcggcgaggcgctgcagaggaagctcccctacgtggccttcagcttcctctacatcctcctggggctcacggtcattggcgccttcctcaacctggtggtcctgc

SEQ ID NO: 758 - DNA, 228 bp, Homo sapiens
ggctgcgccaagaccctgtacatctcagatgcagacaagaggaagcactttcggctggtgctgcggctggtgctgcgcgggggccgggagctgggtaccttccacagccgccttatcaaggtcatctcgaagccctcgcagaagaagcagtcgctgaaaaacaccgatcgtgagcagggcggggcctgacccccggcccgggcggggaggtgcaaccaagcccagaac

SEQ ID NO: 759 - DNA, 60 bp, Homo sapiens
gcggtccgagctttgccccacgccagagtcatcggcctctgcctgccccggggcggccgc

SEQ ID NO: 760 - DNA, 228 bp, Homo sapiens
gtctctccgaaaaagaaaaagaaaaaagactccctccatgagtgtctggagggagtcctttggccccagctgggcagagaaaggggtcagagatctggcatgtgtgtgtcccttcatccacaggaatacctgtaccgctatggttacactcgggtggcagagatgcgtggagagtcgaaatctctggggcctgcgctgctgcttctccagaagcaactgtccctgccc

SEQ ID NO: 761 - DNA, 308 bp, Homo sapiens
gtgcctcatcgccctgtcccccaccccgaggcccagcccagaggcgggcttcctcctctgccccgcggggggccgcaataattgctaatcagccaccgctaattatccggcccatggagaggtgagcgcagcaagggagcgcggaggcggcgcagaacccgggttccagcccaggctcgcgcagcgggacgctggcacgacgctcttcatgctcttcgtttctgggccttggtttccctggctacacgtaggggtgggagaaggcagtaagtagggctctaactctgaaatgcaagggaaagagcctc

SEQ ID NO: 762 - DNA, 117 bp, Homo sapiens
ggggtcccgcgccgtcaccacgccgaccagggagcccacctgcgcgtcctcctgcacctccaggaggccggagggcggccggaactcggggggctcgtccacgtcggtcacggccac

SEQ ID NO: 763 - DNA, 197 bp, Homo sapiens
gtgtcttcgctggagccgggcgtgcaggtggcggaccctcctcgcctcctgggctgtgaagaaggaagcggcgatggcatgccgcaggcggcgggcgtaggcctccaggagcaccgtggagcccgccaggagctgcagggcccccgcggccagcggggcagctgcgcggggacgccgggcgggtagcagtgggcagc

SEQ ID NO: 764 - DNA, 162 bp, Homo sapiens
gccaccatgcccggctaatttttgtatttttagtactgacggggggacgggggggcgggggggcggggggacggggggcggggggggcggggggggcggggggacgggggcggggggcgggggggggcggcgcgggggggcggggggggcggggggcggggc

SEQ ID NO: 765 - DNA, 142 bp, Homo sapiens
ggcggctgtggaagacgatgcccaccttgtgcaggtggtagtcggcctcggtggctccccgggtgacccaggaggcccggcgcaggcggactttgcccttgacgagcagcgagtgggcaggttccccgcagaaggggtcctc

SEQ ID NO: 766 - DNA, 3768 bp, Homo sapiens
gagctcagggcagtcctcagatgggcttgcagacttgcaaactactacctcaaccgtgggggcccttgttgaagaagatgaggtaattagccaattcagactgtttgagcacgtattgtttggaaacttttctaattacagtcactataacagatctgctaaaggtagtttcatgattaatggctgcccgaagttaccatcctcaaactattaagccattggaaaatgctagaggcttaatactcgtgtatagacagaccctcattcccctgaatatttgctatttggggttctgggtttttagctgctcccaggctgtgtttatttccccaataactggggaaactggggaggggcacgaccccacgggagcctgcgcccacctgcccaagtactggacctggggctagcttgccgcttgctccttgccacccgccaggccccccgcccatcgcttcgcccaaatcctttcaaacaaggttccctcctgccacctgccggcccactagggtctgcgccacaggctcggcgccaccacgcagctcgcggggaggtggcccccacctccttactgcacatgcccggcagaagtccgggcgcgcaacttcgcagaacctcactgcccgtccctcctcgcctcagtctcctctgtcctctcccaggcaagaggaccggcggaggcacctctctcgagtcttaggctgcggaatctaagactcagcgagaggagcccgggaggagacagaactttccccttttttcccatcccttcttcttgctcagagaggcaagcaaggcgcggagctttagaaagttcttaagtggtcaggaaggtaggtgcttccctttttctcctcacaaggaggtgaggctgggacctccgggccagcttctcacctcatagggtgtacctttcccggctccagcagccaatgtgcttcggagccactctctgcagagccagagggcaggccggcttctcggtgtgtgcctaagaggatggatcggaggtcccgggctcagcagtggcgccgagctcgccataattacaacgacctgtgcccgcccataggccgccgggcagccaccgcgctcctctggctctcctgctccatcgcgctcctccgcgcccttgccacctccaacgcccgtgcccagcagcgcgcggctgcccaacagcgccggagcttccttaacgcccaccaccgctccggcgcccaggtattccctgagtcccccgaatcggaatctgaccacgagcacgaggaggcagaccttgagctgtccctccccgagtgcctagagtacgaggaagagttcgactacgagaccgagagcgagaccgagtccgaaatcgagtccgagaccgacttcgagaccgagcctgagaccgcccccaccactgagcccgagaccgagcctgaagacgatcgcggcccggtggtgcccaagcactccaccttcggccagtccctcacccagcgtctgcacgctctcaagttgcgaagccccgacgcctccccaagtcgcgcgccgcccagcactcaggagccccagagccccagggaaggggaggagctcaagcccgaggacaaagatccaagggaccccgaagagtcgaaggagcccaaggaggagaagcagcggcgtcgctgcaagccaaagaagcccacccgccgtgacgcgtccccggagtccccttccaaaaagggacccatccccatccggcgtcactaatggaggacgccgtccagattctccttgttttcatggattcaggttagttgcccaccgctaaactggggagcctgagggcggtgtgggagcagcgcaggtggaaaggaggtgagaaggaaaggcaggtcaggggcgagtgggaagagaggaggctcagctggtcagcctgggatcgggggtcagggtgaggcggcgagggctcccccaaacttcccaggatgccaggggcgccctggtggccaaaggcttgttggacggcggggcgcacgccgtgcgtcccgctggagacaacctgaggtctccgagctggtgccccggctacgcgactgaatcccgaacgcaccccagatttggagctgcacacccaaacggcattggtaagtcacttgttttgcgcgcttttcttcctcctagaaagactagtctcaaataagttggccttctcaggtgtccaaaatgtggttcggaggtgcgcgcgccaactttcacgatgtgagagcagccgcgctgtagagacaccgttgaaatgtgcggaaagtaatctgaatgggaatgggcgagaactctagagactgaccacccgggagggaagtcacgcgcgcgcggcgcctaagcagctcagagccggagcccaggtcccagagctgacaattaagccgcgggacctccgcgccagtgcctccagctgccgtgcgccagccttggccgccacagcccgcctcccgtcgctcgcgggacagagaccgcctcaaagagcgtgcgcacctgcccgcgcgcgccggagctgacctctcccggcggcgggcggttaggggaaagtacctgggggaaaggtagaggaggtaaggggacccttggggatgcccctacgggctaccagggttgaacgcacaggcatggtcacgtcggggtattgccaagcttttggcgcagctggtcgggtggccaggctgcatgcggcttagcaggagacgtcctgggctgtttgcgcaggacctctggaggccctcgagatcgtcgcaagtggaaaggtaaagcggaacaagggacaggctggagacgggggtcgcgtctaacatcaggataacttacaattcgtttccaaagagcgcggtacgcgcagagctggggaaaggtgttggatccggcgccagtccttggacgatcagtcgtcgaaaaggaggcaggggccggcggctccggcagccttggggaggggaggcgaggcggcgtgctccggccattttcagcacgggtagagttaagtttaatctgtaacctggaggggaatctgctctgatgacccagcacaaaaacggcagcaatctggtaacgcaccttcggaagggaaggcgtgctctcctcgccagtcctggggggaaagactgataagtgaaatgtctttaaaaaatctcatccgacttggaaattgattttttttttcctggtgtgcgtgtctcattttgcgccggcttaattatacggatgacaacgatttggaggaatagtaaagcgttttgagggcttgagatgaatgacggtcaggttcttaactcctaagaaaaggatgatgatagaaggaaaataccttaaatggtcttccttccaggacctattccgtaggaaaggcgtcgcggcgcccaagacttagttctgccgggctgcagcgcagactgtggttggatgcttttgtggtcttccctagtaaatacggagaaactagtttatttgcaagtggttttctgcgacagcaatgttagtctcagaagtttggaggctgcggaagggctaggcgtgccccgcttttggcttgcccctaagtcgaaattcctgcttaatgtaaacaatgatggtgtgttggctttctgtgacattaagtgttcagtttttcctctggtaatgtctcagcctgagttcaccaagcaaaatgtctctagggacaagcaagaaaaactagggattgtgttgaatttctttggtgtgcctttcaagtgtgggagctatcttcagactgggtattccgggagaccc

SEQ ID NO: 767 - DNA, 2199 bp, Homo sapiens
gtctatccttccttggaggcccatataaaaagtcattttctccagcaagactttcaaggtccccccaggtggagttcttttcttccatttgtatgctgctctactctccaggatgaggaactggtatttgtctaacttgttaaatttgttttagtcacctccatgcatgtgctcccctggcaaagctcatgatatcagaaagaatgaacaaaggggtcccacagacccatgagggtgtcgaacagagaccctgaacccgttcctcgacaaatggtactttgggggtgagcgcgaggcctgacgaaagcaaacaacccctttggagcacccatggcagcctccctggggctccaaccccaatgtctactgaccttccacttgtgcaggctcagcatccctggggcctcaactccttatccatcctgggctgctcctcgcagtaagccctctccttggggtcctggccctctacctcccagccctggaaatcttcttgctcctcaccttgcccggcagtggcaccccgttggctgggttagcctgccgccatcaacacacccaagggttggcccctgggaccccacctctcccccgaggctcggcaacctgtggcatgaggaagagtgaccccacggcgctagcggtcctcgtggtcttccaggcctagccgccatacacccgccccccaccggcttccaaccaccccagcagcacctcttcgggcgttccaacgcggcgccccctattggacctcccacccatatccggtttccggtctgacgccccctgctcattcgccaggcagccttgattggcatgacccctgcccaatggctgacccggcgctggggtcggaggggagtgagttggtgttgggacccagttgggccattcagtggatgctcaagtggttaagccgtcttgcgtgggtgtagttggccaaagtttgaatcaaagttcagtgttgacatctggaagtgtgtagacccatagagctaaagcgatatatctttgggggatcccaaacgtttcccagggtccaactgtgttcgcctccttccgtgctgcgtggccacatggatggtggatgcaggggtgcaaggatgcacggtgcctgtggtaccctggctctaagagggatgcattagactaaacgggatcgcaacttgcggtggttcgcccgcctgcagctcttatacagcagcccgtgccgtgcgccctgcttgctgcagcccgccctgtgtaactcatccagcctcccctcccccagggttctgcaggtcagatgaccccctgcctcctgcccagttgctctgtgcctagacgtggctcgccaatctgtctcactggtgagaccgacctgatgcgcacctgccgagttttatgtgacccccttacagcagcttttctcccgggttccaatccctctgcagaccccagaccagagcatagcatgtgcacacatcaaggccaccaggtggtgtgggcatttacctttggctagctctgagctcaccgcagcatggtagcgggagcgcagctgcgcgggcaaccgccgggtttgtggccggttggcgggctcagtgccgcctcagtgggctctagcagtagaaaagtaaagcgactaccctaagatacccagagcgagaggagaggggctagaagggtgctggaggcaggctgtagtggggctaaaggagctgactgaccagcgctgcggccggtgcccgaagcagcgagcagcgcacctcagctccggttgccgcgcggcatggtatttatctgtgggttcagtgcgcacagcgttgtccagtctcgaaaccaccctaaaccggcattaaaccccaaccaaaatcccctttaacccttccctagaacagcaggacctgcgaaactctgaggccgctttgtgaggtcctcctctgcgcagcacgccccccacccctctcttggtgccgccgcagctactccctagggggctttgctcttggtggtacgcacccgagaccttcttattcccctgcgtcaccatccacataaacaagagagcaccctgcttgcgccgctgtgggccactgcggagacccctagagtgtgatgggggtgggggctgttaaagtgctttaccggagccaacctcagcaagtgacaaacaaaagcagcaaaaagtacacccaaggcatttaaaaaacaaattgc

SEQ ID NO: 768 - DNA, 2978 bp, Homo sapiens
ggagctcctcccgaggagccccaagccctcaggcctgcaaaggctggctccagaggaggctacagccctccccctgaggagactatgccatttgagcttgatggagaaggatttggggacgacagcccacccccggggctttcccgagttatcgcacaagtcgacggcagcagccagttcgcggcagtcgcggcctcgagtgcggtccgcctcactcccgccgcgaacgcgcctcccctctgggtcccaggcgccatcggcagcccatcccaagaggctgtcagacctccttctaacttcacgggcagcagcccctggatggagatctccggacccccgttcgagattggcagcgcccccgctggggtcgacgacactcccgtcaacatggacagccccccaatcgcgcttgacggcccgcccatcaaggtctccggagccccagataagagagagcgagcagagagacccccagttgaggaggaagcagcagagatggaaggagccgctgatgccgcggagggaggaaaagtaccctctccggggtacggatcccctgccgccggggcagcctcagcggataccgctgccagggcagcccctgcagccccagccgatcctgactccggggcaaccccagaagatcccgactccgggacagcaccagccgatcctgactccggggcattcgcagccgatcccgactccggggcagcccctgccgccccagccgatcccgactccggggcggcccctgacgccccagccgatcccgactccggggcggcccctgacgccccagccgatccagatgccggggcggcccctgaggctcccgccgcccctgcggctgctgagacccgggcagcccatgtcgccccagctgcgccagacgcaggggctcccactgccccagccgcttctgccacccgggcagcccaagtccgccgggcggcctctgcagcccctgcctccggggccagacgcaagatccatctcagaccccccagccccgagatccaggctgccgatccgcctactccgcggcctactcgcgcgtctgcctggcggggcaagtccgagagcagccgcggccgccgcgtgtactacgatgaaggggtggccagcagcgacgatgactccagcggagacgagtccgacgatgggacctccggatgcctccgctggtttcagcatcggcgaaatcgccgccgccgaaagccccagcgcaacttactccgcaactttctcgtgcaagccttcgggggctgcttcggtcgatctgagagtccccagcccaaagcctcgcgctctctcaaggtcaagaaggtacccctggcggagaagcgcagacagatgcgcaaagaagccctggagaagcgggcccagaagcgcgcagagaagaaacgcagtaagctcatcgacaaacaactccaggacgaaaagatgggctacatgtgtacgcaccgcctgctgcttctaggtaatgcggcggactctgcctgcgggcagcagggccgccggggaaccggggagggggtggcagggctgcctggtggggctaggggctccgcagtgggaggagggggtccagccaaaggcgggaagaacttgctagaaagttccagggagggaccctaactgccctgggagcgggaggggatctttggtggattcgggtggccgaagtatatgccctccagggagaaaagtggtgccgagcgacactgagggtcgtttccggctggacaggccagcgccagcaaccgtaagctggacaggcaggggcttcaggtgagccaggaactgccggggaggggccccggggccccgggactcccctggctaggctggtggggtccacggtgggctggggtcattggggaaggcgcgccccgcctcgcctggcacggctgcttggactcagacagcttgtcgttggtgtgtgttggtgtccatattctgtgttcgcctgtgcatgatacgctgaagtgtcccctgttcctatcccggcacccccaaattacccgccgactgtgtacttgtacttgggaacgggctgtgttgtggtttgcgccatggcccgggcaaaaaactttcgctgttcgcacactctggtggtacctgcgcccgggcgctctgcggcaagcggtgcggaggacacgcggggaaggtggcggggcctcccgggaaataagcggggcccttggcctgggggagcggggaatcgcttttcgccggcctccgcgtaaccttgtttctgtatgtctttctctctttttccttttgcgctaagcgtttcctcacttctcattcgttcgccaaaccctcccgcctttacagttgaaaaaccagacacacaggtatctggggcgcccggggctgcacacctcagttcggtattctgcacacacacagctcgcctggtcgggggatgggggaaaggggaaacacaacctgctgtaggcaagtccggatcccaaaccacttgggggctggttccaagggggtgggcgtggctgtgtttaaaaaatatgaaataatttttcttcctagcgaagagcccgaggtaagccaatcatttttacaaagagtacagtaggaggggcttggtttaaaaagatgggggttatgtgttgtgagtggaatgtcacctttgtgtttgaaatgcaactaaaataaaagttttcaaaaaatgctctgagtgtatttgaagtgtgtggacaaagtatggcaaaaccgtgaatatgacttgtgaaaacaagtaaatgtttgcatgtgaattttttcaggcagctttagctgggggcaaagaggcttgtcaaaggtaaggtcttctgcaaattggctctggatacaaaaaatatataaaggtattttgattacagaagttaaaaatcatgatattcttgtcaggagggtattttggtggccttctaccttccccctcctcctctgctcacatttccccacctctc

SEQ ID NO: 769 - DNA, 1995 bp, Homo sapiens
ggctcacctgggcacatggtgagccgcggaactggcaggcaccaaacatttattgaatgaataaaccgtatcccagcagacaccatggtggcagcagatgacctaaccaaggtcccaggaaaggcgggctggggtcaactgcttgaaaatttagtaaccctgctcctaatcccgtgcactgctatatcctagtgtgcggcgggacacttgagagttttgaaagaaccctcaaacaagttcacgttccgtaaactacttttccctctgttccagagcccccagggcgcccaggcaaggccgccacctctcccacctgggaggacgcctcgagcaccgactccacagccacggccaccgctcctcggctcccgtgacaccggcgcgcctgctgcttcgagcaggggaggctttgcactcccatcgcacttttctcgtccgaagatacgaaactccgtccgggcgtcgcaaataattcgaattcggctctctgacacctacctcggcgggcgcgcgccgctgggagggcggggtgggtggctggaggtaaggaggcgcacagcaggggtaagcgccgccgtcgcacactttgcacgccgcccagggctacaccactcaccgaaaattgggaggcaggtctgggaggcggggttgagcgcccaccgccttgggcgcgcccgcgccccccgccatcgcggcccccgcgcccccggcccacgcccgcgcggtcccggcaccggcctgcacccccagggtgcgcggcggcccatttgggtgcgtccccggtgggccgatttttcgcgcttccccttcggtttataggggccgctgctatgggtcggtcctctgaagaggctggggcgtcatcggggccggttagaagctctgctccccggcggggacactcagtcgcgtcggcaccgcggagcgggctgcgtcaggtggctggccggcgcggcgctcccctgctctctggctccgggctgcggcgcggcggctggagcgagcccctgtcccggcgcggggcggcggcgggcggccggcaggcgctgccttgcgtgtgagtgcacctcactcacatgtaagtcggggagcgccggggcctcccgcggaagtgcgagtcgcccggcgcaggcaagagccgccgggtccgggacaaggcaggggcgcccgggcgccgctgccttgccccggggcgcctccgggcaccccccaattctctctcttttctcttctccattggcgtgcccaagagccaaaccaaggagcgcctgagggtaaacagactcctgccatccgcgcctttgcacttttctttttgagttgacatttcttggtgctttttggtttctcgctgttgttgggtgctttttggtttgttcttgtccctttttcgtttgctcatcctttttggcgctaactcttaggcagccagcccagcagcccgaagcccgggcagccgcgctccgcggccccggggcagcgcggcgggaaccgcagccaagccccccgacacggggcgcacgggggccgggcagcccgaggccgggggcaagcagggagcccgggccaggcgcgagccgagctccccgaggtggccgggccaccatgctgaagatggccatgaagctcaaagcccgggcggcggagagcgagaagaagacggccgcggcggctgccgaggtggctgccgaagctgcggcggcggctgcggcgttggccgagccgagagagccgctcgcgccgcggaagagcggggaccccgagaagctcgcgaagaaccccaagaacccggcgcgggaggcgctccccgaaaagttcctaacagacaaggagcgcaagaagctcgagaagaagctgctggagcagaggcgaaaggaggagaagaagaaggagaaggagaggaagaagatggagaagatgctgaagaagaagaagaagaaggtgccagaagcccaggaggaggcccgatgccccgaggccgccgccgccgcggcc

SEQ ID NO: 770 - DNA, 1070 bp, Homo sapiens
gtttccctttctctctcagcctcctttgaggccaaggctggtacaggataaataattttgctttctggatttagaggaattggtttgagtcttgacttttactagttctttgggcaaaatttgttccttctcattgtctcaggtcctcatctgtagaatggggctggagtttctgagtccataattcatttaatctggtgcccaagaaccccatgaagcctgtccaggaatacctgactcatttgcccttgagattgaggagaggctcaagttacatgagacagtgactgtgaaagtgctgtgtgaactacaaaggactttacagtgtgtggttatcatggctgggaggtggcaggggtgagcatacactgaattttccccccaggtctggacaagacgtcttcaagccaaaggagggaggcagtgaatggtgcaggtccatactttccccagcagggagctcgtagggattcgggagtacattctgggcccttgagtttgtgctacatgcatgcctatggtgctcttcctgccggggtgagacttgccctccaggttgagaaaatgacgaaactggaataatcctccaagctccaactcgtcccagaggcctccctggcaatactgtgctcttgtagggaccccatcgtcctctaggtaaatagttcacactggccctcaccccactgctggctgctggcagggagcatggggaatctgctccaaaaacaaccattgcttcctgcagtagcattttgagagtttcctccaaatgtttttcctcatctaattttcagtatggccccgtggggtcaggaggtgatgtgtggccagccctgtcctaattaggagtcttgcccaagttcatacgttgaggaaaagaaatgcaagctcagttccaaggtttttcccttgctaaaactcttaaaattttggcttgcttatttccttaacttccaaaggacatgaacaagtgatttttgtaccaccctccacatagacattagcgatcattttcagtcattttcagctttccggttttgctaggaggcacctggcgtgccgggaac

SEQ ID NO: 771 - DNA, 57 bp, Homo sapiens
gggcgcggggggtggcgggggcggggcggcggcgggggcggcgggcgcgggggcggc

SEQ ID NO: 772 - DNA, 318 bp, Homo sapiens
ggcctgcgggcaccccccgggcttgcatgccccccaccccatgccgggcctgcgagcgtcccctgggcctgcgtgcacccagaggctgtgtgttacgtgctgtgggcgattctctttaaagcagcaacaattacatgcaagtttgaatgaaaactgctctgaaggcttcggagaaactgctgaatgaggctatttgggggtggggacaggaggagtcagtaggtttagttttattccacacttttcttgatggtgggaatgtgaaactagctgtgagggctgctcttatttagaaattttggaaagaaagtctcaggc

SEQ ID NO: 773 - DNA, 125 bp, Homo sapiens
ggggaagagctccatgatcattcttttctgtaggcgaaaaactgcggcgggaactgctgccatgcagctgggctcccaatgcagtggggatggtggcgctctgggctggcgggagctatcctgcc

SEQ ID NO: 774 - DNA, 301 bp, Homo sapiens
ggggtggtgtgaacacctcggttctggggacgctgcctcccacctcccacagcctgcacatctctacctagaaggaatctaaaggtgagcatcttagccagacgtggtggctcagcctataatcccagcacttgggaggccgaggcaggcagatcacttgaggttaggagttcaagaccagcctggccaacatgatgaagccccatctctacaaaaaaatacaaaaattagccaggcgtggtggcgcacatctgtagtcccacctactagggaggctgaggcagaagaatcgcttaaatcc

SEQ ID NO: 775 - DNA, 182 bp, Homo sapiens
gcatgtttttgccctgatacccccagcgcgtcatgggttaaggctgctccaggcctcaggcagaggctctgggcaggtggggttccgctgggctgggtgaggtggcgaggcctgagggaagtggctggagctgacggcacctgctccttagatttaaaccagccgtgacatttccaatattc

SEQ ID NO: 776 - DNA, 129 bp, Homo sapiens
gtccccaccgtcctcccgtcacctcgagggacttccttccgtccccaccgtcctcccttcacctcgagggacttccttccgtccccaccgtcctcccatcacctcgagggacttccttccatccccacc

SEQ ID NO: 777 - DNA, 637 bp, Homo sapiens
gtagctcaaaatgtaaaccctgcagggctggggcccctcatcctgtggggggaagccccagactatccggtgcccctcggcagtgcccgggctacacgtgacctctcctgggcaagcagtcatctcaggtttgatgtcagagcccagtgggacccaaggtcagggctgatccacagaggatgaaggaaaagtgaccccagttcccgtttgagcagatgcaccagagctgagatgggagcaaggattaaggtgctctggtgtccaggacattgggagagacaaacctgttcatcttatttttcagaaaaaaaaggggaaaaccctgctgaggtcttggggagccatcggctggcttcacagcctcctgggggtggccgagagtggcatcccccgtggggatgccgggctggaggggccggctcaggatgcaggtggagctttgcaccctgcagctcgcggttctcccgtctacaaatggcgttggctccagcagctttgccacaccttggaaggttctggaaagtgaatcctgcatcaaggcttgaaaatccttgcttcctcctttgtttaggatgtcctttcaaagagctagctcattaatcatttatgtttttaattttgtgtcttgcacacccac

SEQ ID NO: 778 - DNA, 285 bp, Homo sapiens
gacccccaaagtaagatgccagagcggcatgaagccaggaaataagccagaccccacagctcctccaaagacccctgacgctcctggttgaccctctcatggggacggggcttctctcccctcagcagagccaggagctgcctcaaggcccatgcacctgccagtccagcctgtcccccgggctgccttctccctccctggcttctggatagggaccgttgcccagtgcttcctgagtccagccacctggtgggcacccccagagactcagccctgactccaggc

SEQ ID NO: 779 - DNA, 115 bp, Homo sapiens
gtccagaagcgcaaagggacccatcgcagtccccaagagccacagcaggggaagactgaggtgaccccggccgctcaggtaacgtgggccagggtagggcgctgtgggtggggcc

SEQ ID NO: 780 - DNA, 181 bp, Homo sapiens
gattgctggttttatgccttttcttccgtgataggaagtatgtccagactcatctggctggggatcctcaggagagcctgcggggggcagcagaggcccgcctgggccagggcgtgcaccagaccagaatcctgcggatttagtattgtgagggtagaagaccagcaagcagcatgacctc

SEQ ID NO: 781 - DNA, 934 bp, Homo sapiens
ggcctgcggaggacagaaagctcacagcttctgtccatacccctttcacttcctcctcaaggagatggacctctgtggttggtcaagcttaaggatcttttatgtgccacagctaatggtgaaatcttcctaattctaggtgaagattaatgggcaagttggagagttaaggtagcttgtggctgctccttttagaagaaagtctgatcattgctctcttatttgtggaacccctctgttcccccaaatgcttggtaagacatgcctgaagaccaatcctgtgtcagtagacttcatatctactctcttctaccaatcacacaactacagacaaataagaaaaataaaacaaagctcagacacactgccctggcacggaggccactctccagctggctgcttttctctaccctggcgcctcctgggcatttggctctttcttagatcaaagcgagacataagtttgggattaaagagaagtaggtgaaaggggtctctggcctgttttggcattagaccaagtaaataacagagttctggcttaagctcagctctgtagagctttctctgtgtttggggaaaatctccgatagtaatgaagtgatattttactgtgcttcgttttctgtacatatatctctttcttaggtatgttgtgagggaggagattcgttccctggataaataccatcttaatcaccttcattaccaactttattttatttgcagagttaaaatttaaatagacattcaggaaacaagtctggtgagagaattatgttacgaggttaatctttcagcatctgccttagggacattgattattttcccccttgtttttcaccaagctccaggcttgcaaaaaaattgtgatgtggtctgaggcaaacttactgattggctagtggtaagttaaaccataacctgtaggacc

SEQ ID NO: 782 - DNA, 1841 bp, Homo sapiens
gctttagctttgaaaaaatctttaacatgaaaaaaatgcactaacattgttttcaatgtaacataggctagaatttgcctatgtttgcacatgctgagaattgtccaacccggttgatgtgttcacctcttcagcttggaccttgttgtgaatttatttacaaacatcagttgccttcaagccatcctttctgctgtatgttttgtagccttctatagtagatacacaacagataatgtggagagaaaagacataagaagaggaaggtaatgagagacgttgtcaaggtagtaaccttcttggtttctttgaagaatttgttgcctttctactaagacaacaaagaagcattttgttactgaccgcctaaaaccactcaatctcaggtgaatgcatcacttgccaagctgttggaatgctatatgtgttttgttgcacaattttttggttgtttatttggttggctttttggaaggcaaatttggaaaggggacctacacaggagtgctgacccacccacattcccttattatcattacagacaagaagaaactagcagagctaagaatggagtgaagaaaggcagtgtgataagcaccagcaaagagttgagggctgttgctctctaaattattatttgattattttaaaagtatggaagttttctagtcactgaagaaaggaggtgtaagtgcacttatttttatatggagttacttaactacctcctaaacacatacgtggcaattgtttttgcttgtgcaaagtattttaattagcaagaattcatatattgagattataattagagagctcaatttatatatttgctatcctgctcaagcctgacatggaaaaaaaaaaccaagttcactccaaaatatatagcttcaaaataataaatactggaaagtttgctgtgataactattttgtacttttgtacaaaaaaactaaagaacaaattacctaaagaacaatttgctaaacatgagaaattgcacctttgagtatatacaggtaagataggaagagtgttcagaccagtaaattatagtttatattgaagataatattcagttgattcataacaaataaccagcattcatgataacatttcagcatttccaaggtaccaagtgtactgatttttaaaaatatattttagaaggaatttagaactggtatttttaatgaagactagcatctctgatgttgcaacatgtatgtgaaatgggtgttacatctatcctgccctttaacctcaccgttaacaaagtggctgaaaataacagcaagaaaaaatcagtctaagggagaaaaccactaatgctctcaattctctctctctctctctctctttctctctctctgtgtgtgtgtgtgtgtgtgtgtgtgtgtgtgtgtgttaagggggatggcgggtggtggtcttaacccttgaaagaaaccttctttgtataggaagcatatttcggtttaggtacaatgataagaaagtttaattttataatctataagaccagataccttcagaaatgatttttcctgtgggatttctatgactggtattctgactagtgtgaaatggcagaattggatgtctatatctacacccatcaaaacctcacagcttcatgcactgctataacttttctgttaactctgggtaaattaggaggctggtacaaggaataatttcaacttcagattttacagtttgtttacgttaagggcagaaagatctacttttcaacgatctgtattttaagatattgacttttcctggtgctattttatgaatatggataaaatagaattcttattagaaatctcaactcc

SEQ ID NO: 783 - DNA, 206 bp, Homo sapiens
gaggacattccattcaattcgtttcaattccagtccattccattgcagtccattccttttgagtccattccattcgggactattccactccagtcaattccattcgagcccattctattccaatccatttcactccagtccattccatttgagtccattccattcgagtccattccattccagtccaatctattccagtctattcc

SEQ ID NO: 784 - DNA, 38 bp, Homo sapiens
gatcctttctggcgagtccccgtgcggagtcggagagc

SEQ ID NO: 785 - DNA, 221 bp, Homo sapiens
gcgcgtcgcctgggccggcggcgtggtcggtgacgcgacctcccggccccgggggaggtatatctttcgctccgagtcggcattttgggccgccgggttattgctgacacgctgtcctctggcgacctgtcgctggagaggttgggcctccggatgcgcgcggggctctggcctaccggtgacccggctagccggccgcgctcctgcttgagccgcctgcc

SEQ ID NO: 786 - DNA, 171 bp, Homo sapiens
ggagtggggggttggccggagccgatcggctcgctggccggccggccggcctccgctcccggggggctcttcgtgatcgatgtggtgacgtcgtgctctcccgggccgggtccgagccgcgacgggcgaggggcggacgttcgtggcgaacgggaccgtccttctcgctcc

SEQ ID NO: 787 - DNA, 91 bp, Homo sapiens
gcgcgggccgtgtgagcgatcgcggtgggttcgggccggtgtgacgcgtgcgccggccggccgccgaggggctgccgttctgcctccgacc

SEQ ID NO: 788 - DNA, 33 bp, Homo sapiens
gaggcggttctcggtgggggccgagggccgtcc

SEQ ID NO: 789 - DNA, 102 bp, Homo sapiens
ggttcccgcgccccgccccggccccaccggtcccggccgccgcccccgcgcccgctcgctccctcccgtccgcccgtccgcggcccgtccgtccgtccgtcc

SEQ ID NO: 790 - DNA, 174 bp, Homo sapiens
ggctaccacatccaaggaaggcagcaggcgcgcaaattacccactcccgacccggggaggtagtgacgaaaaataacaatacaggactctttcgaggccctgtaattggaatgagtccactttaaatcctttaacgaggatccattggagggcaagtctggtgccagcagccgc

SEQ ID NO: 791 - DNA, 203 bp, Homo sapiens
ggaactgaggccatgattaagagggacggccgggggcattcgtattgcgccgctagaggtgaaattcttggaccggcgcaagacggaccagagcgaaagcatttgccaagaatgttttcattaatcaagaacgaaagtcggaggttcgaagacgatcagataccgtcgtagttccgaccataaacgatgccgaccggcgatgc

SEQ ID NO: 792 - DNA, 153 bp, Homo sapiens
gataacgaacgagactctggcatgctaactagttacgcgacccccgagcggtcggcgtcccccaacttcttagagggacaagtggcgttcagccacccgagattgagcaataacaggtctgtgatgcccttagatgtccggggctgcacgcgc

SEQ ID NO: 793 - DNA, 100 bp, Homo sapiens
ggtcgaacttgactatctagaggaagtaaaagtcgtaacaaggtttccgtaggtgaacctgcggaaggatcattaacggagcccggagggcgaggcccgc

SEQ ID NO: 794 - DNA, 24 bp, Homo sapiens
ggccccgacggcgtgggtgtcggc

SEQ ID NO: 795 - DNA, 59 bp, Homo sapiens
gcgttccggcgcggaggtttaaagaccccttggggggatcgcccgtccgcccgtgggtc

SEQ ID NO: 796 - DNA, 52 bp, Homo sapiens
ggctcggggttcggggttcgtcggccccggccgggtggaaggtcccgtgccc

SEQ ID NO: 797 - DNA, 51 bp, Homo sapiens
gaatcccggggccgagggagcgagacccgtcgccgcgctctcccccctccc

SEQ ID NO: 798 - DNA, 109 bp, Homo sapiens
ggtaaagcgaatgattagaggtcttggggccgaaacgatctcaacctattctcaaactttaaatgggtaagaagcccggctcgctggcgtggagccgggcgtggaatgc

SEQ ID NO: 799 - DNA, 169 bp, Homo sapiens
gcgacgagtaggagggccgctgcggtgagccttgaagcctagggcgcgggcccgggtggagccgccgcaggtgcagatcttggtggtagtagcaaatattcaaacgagaactttgaaggccgaagtggagaagggttccatgtgaacagcagttgaacatgggtcagtc

SEQ ID NO: 800 - DNA, 56 bp, Homo sapiens
ggcaagccggatccgtaacttcgggataaggattggctctaagggctgggtcggtc

SEQ ID NO: 801 - DNA, 148 bp, Homo sapiens
gcgggtaaacggcgggagtaactatgactctcttaaggtagccaaatgcctcgtcatctaattagtgacgcgcatgaatggatgaacgagattcccactgtccctacctactatccagcgaaaccacagccaagggaacgggcttggc

SEQ ID NO: 802 - DNA, 229 bp, Homo sapiens
ttttctttctctttctctttctctctctctctctctctctctctctgtctctcgctctcgccctctctctctctctctttctctctgtctctctctgtctctctctctctctctctctctctctctctctctctctctctctctctctctccctccccctccctccctctctccccttccttggtgccttctcggctcttgacacttagccgctgtctcgccgtgtccc

SEQ ID NO: 803 - DNA, 379 bp, Homo sapiens
ggagtctcgctctgggcggggcgaggcgaggcgaggcacagcgcatcgctttggaagccgcggcaacgcctttcaaagccccattcgtatgcacagagccttattcccttcctggagttggagctgatgccttccgtagccttgggcttctctccattcggaagctttgacaggcgcaaccccacccagaggctggctgcggctgaggattagggggtgtgttggggctgaaaactgggtcccctatttttgatacctcagccgacacatcccccgaccgccatcgcttgctcgccctctgagatcccccgcctccaccgccttgcaggctcacctcttactttcatttcttcctttcttgcgtttgaggagggggtgc

SEQ ID NO: 804 - DNA, 140 bp, Homo sapiens
ggttgatgtttactatccttcatcatgacatcttattttctagaaatccgtaggcgaatgctgctgctgctcttgttgctgttgttgttgttgttgttgtcgtcgttgctgttgtcgttgtcgttgttgttgtcgttgtc

SEQ ID NO: 805 - DNA, 127 bp, Homo sapiens
gagtccttgtgtgttctttctccctccctccctccctccctccctccctccctgcttccgagaggcatctccaaacacccacgcgccgtgggttgtcttctgactctgtcgcggtcgaggcagagac

SEQ ID NO: 806 - DNA, 28 bp, Homo sapiens
ggccttcggtccctcgtgtgtcccggtc

SEQ ID NO: 807 - DNA, 155 bp, Homo sapiens
ggccccgggggaggtatatctttcgctccgagtcggcattttgggccgccgggttattgctgacacgctgtcctctggcgacctgtcgctggagaggttgggcctccggatgcgcgcggggctctggcctaccggtgacccggctagccggccgc

SEQ ID NO: 808 - DNA, 180 bp, Homo sapiens
gccgccccttccccggagtggggggttggccggagccgatcggctcgctggccggccggccggcctccgctcccggggggctcttcgtgatcgatgtggtgacgtcgtgctctcccgggccgggtccgagccgcgacgggcgaggggcggacgttcgtggcgaacgggaccgtccttctc

SEQ ID NO: 809 - DNA, 226 bp, Homo sapiens
gtgggtcctgagggagctcgtcggtgtggggttcggggcggtttgagtgagacgagacgagacgcgcccctcccacgcggggaagggcgcccgcctgctctcggtgagcgcacgtcccgtgctcccctctggcgggtgcgcgcgggccgtgtgagcgatcgcggtgggttcgggccggtgtgacgcgtgcgccggccggccgccgaggggctgccgttctgcctcc

SEQ ID NO: 810 - DNA, 455 bp, Homo sapiens
gaaaaataacaatacaggactctttcaggccctgtattggaatgagtccactttaaatcctttaacgaggatccattggagggcaagtctggtgccagcagccgcggtaattccagctccaatagcgtatattaaagttgctgcagttaaaaagctcgtagttggatcttgggagcgggcgggcggtccgccgcgaggcgagccaccgcccgtccccgccccttgcctctcggcgccccctcgatgctcttagctgagtgtcccgcggggcccgaagcgtttactttgaaaaaattagagtgttcaaagcaggcccgagccgcctggataccgcagctaggaataatggaataggaccgcggttctattttgttggttttcggaactgaggccatgattaagagggacggccgggggcattcgtattgcgccgctagaggtgaaattcttggacc

SEQ ID NO: 811 - DNA, 172 bp, Homo sapiens
gggaaaccaaagtctttgggttccggggggagtatggttgcaaagctgaaacttaaaggaattgacggaagggcaccaccaggagtggagcctgcggcttaatttgactcaacacgggaaacctcacccggcccggacacggacaggattgacagattgatagctctttctc

SEQ ID NO: 812 - DNA, 41 bp, Homo sapiens
ggggagcggtccccggccgcggccccgacgacgtgggtgtc

SEQ ID NO: 813 - DNA, 44 bp, Homo sapiens
gacccctctccggagtccggtcccgtttgctgtctcgtctggcc

SEQ ID NO: 814 - DNA, 147 bp, Homo sapiens
gaatcccggggccgagggagcgagacccgtcgccgcgctctcccccctcccggcgcccacccccgcggggaatcccccgcgaggggggtctcccccgcgggggcgcgccggcgtctcctcgtgggggggccgggccacccctcccac

SEQ ID NO: 815 - DNA, 108 bp, Homo sapiens
gctgcgggatgaaccgaacgccgggttaaggcgcccgatgccgacgctcatcagaccccagaaaaggtgttggttgatatagacagcaggacggtggccatggaagtc

SEQ ID NO: 816 - DNA, 297 bp, Homo sapiens
gctccccgcccccggagccccgcggacgctacgccgcgacgagtaggagggccgctgcggtgagccttgaagcctagggcgcgggcccgggtggagccgccgcaggtgcagatcttggtggtagtagcaaatattcaaacgagaactttgaaggccgaagtggagaagggttccatgtgaacagcagttgaacatgggtcagtcggtcctgagagatgggcgagcgccgttccgaagggacgggcgatggcctccgttgccctcggccgatcgaaagggagtcgggttcagatcccc

SEQ ID NO: 817 - DNA, 31 bp, Homo sapiens
gatcctttctggcgagtccccgtgcggagtc

SEQ ID NO: 818 - DNA, 54 bp, Homo sapiens
gtggggtgcggaccccggcccgacctcgccgtcccgcccgccgccttctgcgtc

SEQ ID NO: 819 - DNA, 309 bp, Homo sapiens
ggggaatcagggttcgattccggagagggagcctgagaaacggctaccacatccaaggaaggcagcaggcgcgcaaattacccactcccgacccggggaggtagtgacgaaaaataacaatacaggactctttcgaggccctgtaattggaatgagtccactttaaatcctttaacgaggatccattggagggcaagtctggtgccagcagccgcggtaattccagctccaatagcgtatattaaagttgctgcagttaaaaagctcgtagttggatcttgggagcgggcgggcggtccgccgcgaggc

SEQ ID NO: 820 - DNA, 209 bp, Homo sapiens
ggaactgaggccatgattaagagggacggccgggggcattcgtattgcgccgctagaggtgaaattcttggaccggcgcaagacggaccagagcgaaagcatttgccaagaatgttttcattaatcaagaacgaaagtcggaggttcgaagacgatcagataccgtcgtagttccgaccataaacgatgccgaccggcgatgcggcggc

SEQ ID NO: 821 - DNA, 149 bp, Homo sapiens
gataacgaacgagactctggcatgctaactagttacgcgacccccgagcggtcggcgtcccccaacttcttagagggacaagtggcgttcagccacccgagattgagcaataacaggtctgtgatgcccttagatgtccggggctgcac

SEQ ID NO: 822 - DNA, 91 bp, Homo sapiens
ggtcgaacttgactatctagaggaagtaaaagtcgtaacaaggtttccgtaggtgaacctgcggaaggatcattaacggagcccggagggc

SEQ ID NO: 823 - DNA, 30 bp, Homo sapiens
ggcagcggccccgacggcgtgggtgtcggc

SEQ ID NO: 824 - DNA, 344 bp, Homo sapiens
gcgccgctccgcgccgccgggcacggccccgctcgctctccccggccttcccgctagggcgtctcgagggtcgggggccggacgccggtcccctcccccgcctcctcgtccgcccccccgccgtccaggtacctagcgcgttccggcgcggaggtttaaagaccccttggggggatcgcccgtccgcccgtgggtcgggggcggtggtgggcccgcgggggagtcccgtcgggaggggcccggcccctcccgcgcctccaccgcggactccgctccccggccggggccgcgccgccgccgccgccgcggcggccgtcgggtgggggctttacccggcggccgtc

SEQ ID NO: 825 - DNA, 20 bp, Homo sapiens
ggccgtgtcggcggcccggc

SEQ ID NO: 826 - DNA, 100 bp, Homo sapiens
ggtaaagcgaatgattagaggtcttggggccgaaacgatctcaacctattctcaaactttaaatgggtaagaagcccggctcgctggcgtggagccgggc

SEQ ID NO: 827 - DNA, 302 bp, Homo sapiens
gccccgctccccgcccccggagccccgcggacgctacgccgcgacgagtaggagggccgctgcggtgagccttgaagcctagggcgcgggcccgggtggagccgccgcaggtgcagatcttggtggtagtagcaaatattcaaacgagaactttgaaggccgaagtggagaagggttccatgtgaacagcagttgaacatgggtcagtcggtcctgagagatgggcgagcgccgttccgaagggacgggcgatggcctccgttgccctcggccgatcgaaagggagtcgggttcagatcccc

SEQ ID NO: 828 - DNA, 240 bp, Homo sapiens
gcgggtaaacggcgggagtaactatgactctcttaaggtagccaaatgcctcgtcatctaattagtgacgcgcatgaatggatgaacgagattcccactgtccctacctactatccagcgaaaccacagccaagggaacgggcttggcggaatcagcggggaaagaagaccctgttgagcttgactctagtctggcacggtgaagagacatgagaggtgtagaataagtgggaggccccc

SEQ ID NO: 829 - DNA, 38 bp, Homo sapiens
gggccccggtggggcggccacccggggtcccggccctc

SEQ ID NO: 830 - DNA, 379 bp, Homo sapiens; identical to SEQ ID NO: 803

SEQ ID NO: 831 - DNA, 317 bp, Homo sapiens
gttgctgttgtcgttgtcgttgttgttgtcgttgtcgttgttttcaaagtataccccggccaccgtttatgggatcaaaagcattataaaatatgtgtgattatttcttgagcacgcccttcctccccctctctctgtctctctgtctgtctctgtctctctctttctctgtctgtcttctctctctctctctctctgtgtctctctctctctgcctgtctgtttctctctctctgcctctctctctctctctctctctgcctgtctctctcactgtgtctgtcttctgtcttactccctttctctgtctgtctgtc

SEQ ID NO: 832 - DNA, 96 bp, Homo sapiens
gggtgccggggagcggtccccgggccgggccgcggtccctctgccgcgatcctttctggcgagtccccgtgcggagtcggagagcgctccctgagc

SEQ ID NO: 833 - DNA, 50 bp, Homo sapiens
ggccccgggggaggtatatctttcgctccgagtcggcattttgggccgcc

SEQ ID NO: 834 - DNA, 91 bp, Homo sapiens; identical to SEQ ID NO: 787

SEQ ID NO: 835 - DNA, 49 bp, Homo sapiens
gccctttccccgggtcggggggtggggcccgggccggggcctcggcccc

SEQ ID NO: 836 - DNA, 302 bp, Homo sapiens
ggggaatcagggttcgattccggagagggagcctgagaaacggctaccacatccaaggaaggcagcaggcgcgcaaattacccactcccgacccggggaggtagtgacgaaaaataacaatacaggactctttcgaggccctgtaattggaatgagtccactttaaatcctttaacgaggatccattggagggcaagtctggtgccagcagccgcggtaattccagctccaatagcgtatattaaagttgctgcagttaaaaagctcgtagttggatcttgggagcgggcgggcggtccgcc

SEQ ID NO: 837 - DNA, 94 bp, Homo sapiens
ggaactgaggccatgattaagagggacggccgggggcattcgtattgcgccgctagaggtgaaattcttggaccggcgcaagacggaccagagc

SEQ ID NO: 838 - DNA, 149 bp, Homo sapiens; identical to SEQ ID NO: 821

SEQ ID NO: 839 - DNA, 73 bp, Homo sapiens
gctccccggccggggccgcgccgccgccgccgccgcggcggccgtcgggtgggggctttacccggcggccgtc

SEQ ID NO: 840 - DNA, 44 bp, Homo sapiens; identical to SEQ ID NO: 813

SEQ ID NO: 841 - DNA, 275 bp, Homo sapiens
gcagacccgacgcacccccgccacgcagttttatccggtaaagcgaatgattagaggtcttggggccgaaacgatctcaacctattctcaaactttaaatgggtaagaagcccggctcgctggcgtggagccgggcgtggaatgcgagtgcctagtgggccacttttggtaagcagaactggcgctgcgggatgaaccgaacgccgggttaaggcgcccgatgccgacgctcatcagaccccagaaaaggtgttggttgatatagacagcaggac

SEQ ID NO: 842 - DNA, 302 bp, Homo sapiens; identical to SEQ ID NO: 827

SEQ ID NO: 843 - DNA, 230 bp, Homo sapiens
ggcgggagtaactatgactctcttaaggtagccaaatgcctcgtcatctaattagtgacgcgcatgaatggatgaacgagattcccactgtccctacctactatccagcgaaaccacagccaagggaacgggcttggcggaatcagcggggaaagaagaccctgttgagcttgactctagtctggcacggtgaagagacatgagaggtgtagaataagtgggaggccccc

SEQ ID NO: 844 - DNA, 112 bp, Homo sapiens
ggtaacgcaggtgtcctaaggcgagctcagggaggacagaaacctcccgtggagcagaagggcaaaagctcgcttgatcttgattttcagtacgaatacagaccgtgaaagc

SEQ ID NO: 845 - DNA, 319 bp, Homo sapiens
ggagtctcgctctgggcggggcgaggcgaggcgaggcacagcgcatcgctttggaagccgcggcaacgcctttcaaagccccattcgtatgcacagagccttattcccttcctggagttggagctgatgccttccgtagccttgggcttctctccattcggaagctttgacaggcgcaaccccacccagaggctggctgcggctgaggattagggggtgtgttggggctgaaaactgggtcccctatttttgatacctcagccgacacatcccccgaccgccatcgcttgctcgccctctgagatcccccgcctccacc

SEQ ID NO: 846 - DNA, 1634 bp, Homo sapiens
gaataaaagcacaaaatggagaagagtcctttttgaaattttggaaaattcttccattcactcaaacagaaatgagcagacttgacaaaaatttcaatgataaaatgatgagtatcttataattattatgtataatgataaaattaaagtaagcacaaaatacttttatcattaaaatggtgatagttaacctgaatcaagttaaaaaatcagggaaaaagtttttttattgaataaaataataattattattcatattacttttattaaaggtcaaagaaggaaataatacaaacaaaagtgaaaaaatacaactatcagaaaatgtatgtcatagtacatcttctgctgctgctgacagattaaccaaagaaagaaagattgggaaaacgtatcctcagcaatttcccaagaaactgaaggaagagcatgataggtaagtaagcctatagcagttttttttttttttttttttgagatggagttcctctcttgttgcccaagctggaatgcaatggtgtgttctcacctcactgcaacctatgcatactgggttcaagtgattctcttgactcagcctccctagtagctgagattacagacatgtgccaccatgcctagctaatttcttgtatttttagtagaaatgaggtttcaccatgttatccaggcttgtctcgaacttctgacctcaggtgttctgcccacctcggcctcccaaagtgctgggtttacaggagtgagccaccgtgcctggccacctatagcagtatttctcagcagataattgtcattgtgctataaactaattcaaaattggactaatgttcattatgattaacaagttttatagttttaccagggatatttagccctgcctagtaatcagaaaaatgcaaattaacataaaataagatatattttgtaaagtcatgctgatattgaaaaagtaattcctaccattgaaaatgagaggaaaaaggcattctcatacaatgttggtatatgaaattggtaaattatttctgaagggtaacttagtgctgtttatcaaaatttcaaataacctgacatccctttaactcaacaactccacttctgggactagatttcacaggaaaacataacttgtgtaaacatacacacacttattaagggcattaattatatattacacataatgaacaatagcttaataaatatataaaatatatgtaataagaaggtgaactggaagtattaagaaagaattagaaaaagtgtggggtaacagatgttagactctttagcctagttttagatgacaataatctgcagatatagtttgtgtgagagatatcttactctgtaaatcatttggagagacacctgcaatatttcatagagatgaaaatttatttctagtgaacttatacgcttgtcaataaatagtaactttaaaaatttagttgattgtaaatgaccttttctaatcaggtaataattatgactgtgtgatttgaaaaggtaattttgaacttctaactatactgaattatttccagtatctttttgtataatacatactagagtgactagtaataaaaactttagcagaatattctttccttactaattttcaagtatatgcattc

SEQ ID NO: 847 - DNA, 71 bp, Homo sapiens
gcggccgtgttttcctggtggcccggccgtgcctgaggtttctccccgagccgccgcctctgcgggctccc

SEQ ID NO: 848 - DNA, 49 bp, Homo sapiens; identical to SEQ ID NO: 835

SEQ ID NO: 849 - DNA, 24 bp, Homo sapiens
ggagccgggcttcggccgggcccc

SEQ ID NO: 850 - DNA, 103 bp, Homo sapiens
ggttcgccgcgccccgccccggccccaccggtcccggccgccgcccccgcgcccgctcgctccctcccgtccgcccgtccgcggcccgtccgtccgtccgtcc

SEQ ID NO: 851 - DNA, 283 bp, Homo sapiens
gtccttctccaggctcatgtggatgtccttgaggttgcgcagggactgctccgcttgtagaagcttctcccgcagcgctgtgatggacttgtacagctcctccacctcactcaccagcttgggggtgttggggggtgtgagctggggctggggagggcagaagtatgcacctactggggtggaggggacccaaaactcccaatgggagctggcaggaggtcctgggaagacgccatgaaaggatcctaccaggaaagcggctctagggcagagcataaattac

SEQ ID NO: 852 - DNA, 982 bp, Homo sapiens
ggtatttctagctctagatccttgaggaatagccacactgtcttccacaatggttgaactaatttacactcccaccaacagtgtaaaagccttcctatttctccacactctctccagtatttgttgtttcctgactctttaattttcgccattctaactggcatgagatgatatctcattgtggttttgatttgcatttctctaatgactagtgatgatgagcttttttataagtttgttggttgcataattgtcctcttttgagaagtgtctgttcacatcctttgcccacttttcaatggggttgttttatcttgcaaatttgtttaagttctttgtagattctggatattagccctttgtcagatggatagactgcaaaaattttctcccattttgtaggttgcccgttcactctgatagtttcttttgctgtccagaaactctttagtttaattaggtcccatttgtcaattttggcttttgttgcctttgtttttggtgttttagtcatgaagtctttgcccatgcctatgtcctgaatggtattgcctaggttttcctctacggtttttatggctttaggtcttatgtttaagtctttaacccaccttgagttaatttttgtataaggtgtaaggaagggatccagtttcagctttctgcctatggctagccagttttcccaacaccatttattaaatagggaatcctttccccagcgctcgtttttctcaggtttgtcaaagatcagatggttgtagatgtgtggtgctatttctgaggcctctgttctgttcctttgatctatatatctgttttcgtaccagtaccatgctgttttggttaccatagcttgtagtatagtttgaagtcaggtggcatgatgcttccagctttgttctttttggttaggattgtcttggctattcaggctcttttttgattccatatgaaatttaaagtatatttttccaattcc

SEQ ID NO: 853 - DNA, 1494 bp, Homo sapiens
gcttgaaccttggggcagaggttgcaatggacctagatcacgccactgcactccagcctgggtgacaaagcaagattctgtctcagagaaaaaaaaaagaagatttagtgttacttatcttttggcaatgcttcccatacaatgttatcaaataagatttagcaaagatgtcaaaaaattgaaaacatttgaccaaaacagaatgacagtttattgttttttattttattatttttttgagacagggtctcaccctgttgcccaggctggagtgcagtggtgaaatcatggctcactgcagcctcaacctcccaggctcaggtgatcctccaccttagtatcccaagtagccaggactatgagcacttgttacgacacatagctagcttttgtattttcagtagagatgcggttttgccattttgcccaggctggacttgaactcctgggctcaagtgatccacccaccttggcttcccaaagggccagaattacagacatgagccgctgcacacagccacatgtcatttttaaataacagtcattcatttaattagcatgacaaccaaaagacatcaaaagcaacgtagaaggttacatggatgtgataactgaaaaccctcagttttcccaagtaattaaaaaaaaataaaggcaacacatggattatcttgataaaacctaaaatctttattacaggccagtcatttaaagggtaaaactcctgtggcataactgtgtcttcttacgggaaactaatttaaatcacttggaagtcaattccgatgacaaggagacttgaatttaattagacatagaaagagtgtgtccagggtcatgagtgagcataatattacaaaggaatgtcaacaggaaaaccagagcatagagcagtggggatccatagctcacaatgatagcaagaaagtttcctggttacatgaagtaattaagacatatttaaaagccaagagtataaaattagacctgatgaaaaagctgaaggagttatcatcccagccaagcaggaaacccaagccttttattccttctcaagaaggaacaggagacagtgatgtgacctgtgagtcatgtgtaacatgaaagtacaggaaaagttgaacttctgatatacaaatctgaaaagtttttatagtaacagatttcaggattaaaagtcaatatttattacctcttattatgagcaaataaatacattaagaaaaccttgttgttttaacccaaatttttagttttttatcactgtttttaatattatagctaatttaaataaactttataaacaatctatctgatctcaatcagttttggcctcgatgtaagatttacataaacttttaataaccttgtataattttttcatctttcccaactttttatacacatgtagttttatctatcttttttattccttcaatttaaaataatccttaaaaatctctaagtgaatttactttctctgaaacaaaaacc

SEQ ID NO: 854 - DNA, 1314 bp, Homo sapiens
gttaaaactctagctgctaaatgagacaaatagggttcccacatcaagtgcctgggctcctgttataaactggactctgcttccattggcttctcttgtttctgttttgataaacccatcatttggcttagtccctacccttgccatgctcacccaccagtaggtggacctccttgaccataactacagacatagatctttgattgtttcttttcaaatgtttgcttactttagaggtgcagtcaaatgttgtttggaccataagactctgaggctgtgtgtggttgaaactgtcttgagactcaaagagctattgaggaagggatttgatagctgaactcttttgaagattttctctgtctctcacacatctggggctgaatagcttaacgtttaatttctacatcgacgatagtttaatagccattcatgcaaatcagttctgctgtgagttattatcctactccaataccaactaacgcattccttaaatttagtgtacgtataaattctacatggtaagtgaagctgtctttatgaatggctgctatagaatatactagattgtgtaggttttagtacaatccaggtaattatcaagcctttgtaatattttcaggaaagtgatcctttcacttcagtttatggaacttgaaaattttttagttgccaccgactagttagatcataaacttaattctatgtatctgaatttatttttctatttataaatttatctgggtgctttctcaaaggtttcccagattaaaaacctatggctttgtaaaattaaaacagaagtaataggaattgagttaaaaaacagaatcaggccaagcctggtggcttatgcctctaatgccaacacttagggatgccaaggggggaggatcatttgaggtcaggagttcaagaccagcctggacaacatggcaaaaccccacatgtattaaaaaaatacacaaattagctgggcgtggtggtgaatgcctttagtcctagctactcaggaggctaaggcaggagaatagcttgaacttgggaggctgaggttgcagtgagccaagatagagccactgaattccagcctgggtgacagagtgagatcctgtcttaaaaaaaaggaaaaaagaaaaagaaaaaacagaatcatacaatgagagagattgtatagcccttttaattgtccataatggatacatttctttttctgtgtaatagtttatcagcatgaaaaaaaagagtcactgaacactgataattttctttctctctctctctctctttttttcctttttttggagatgaagtctc

SEQ ID NO: 855 - DNA, 1151 bp, Homo sapiens
gtgttttaataatgtataattgaatacattaacatttagatgttagtaaatgaataacaaatgttcattgtttctcttgagtagaggaataaaaattttgcacctgttgtatagaatgatttttaaaatctcattcaatccttcagaagtttaagattttttttcaagaatttttatataaaatttttactcagaagcagatagctcacaaaaagtatgggggttttttggattataaataaactattccactcaccaagatgctgagacatcctactttgtggtattttgaaataaaaacaaaacacaagaatgtgacgatgaagcaagtgaaaattaaaagggtacagactttagaagtatcataagctaaaaataaaatgaaacaaacctgtaaaggaaccaaaagcccaggtagatataatacagtaaattatgagaagctaaaaaaaatgaggaggtgataaacaataaagtgaaaatctctgataaagccaaaactacttgaatggcagtcaacaaaacagaagaaaaaaatgacactcataacaaggcagaactatggaaatgcatccctgggggtaagataatagagttgcgaattagtggaggtggatcacaaatactggccaaataaagcccgctaacataattcaaaggacagagaaattctgtagctgaagataaaaagtctgaaatacattatggtatagtcaaatgagtgtcatttctaatagacacacttatttttcaagagttgataatatgaagtaaaaatttagtatgcaaagttcaaattttccatttgttgagtaattcatttttattaaatattttccaacaattaaactaaagtggtaccagaacagagtagacattctgagttttcactttacaaaagctacacataaatctacgtacttcttaagggtataaacaaagtcagagcctgtgtgatatttcaataaacaattggagaaaatttttttaagaatagattatatacatattgacctctttgagaaccttatttttttcttttttttgtgtgtgtgtttgtttttttttgtgtgtgtgtgttttcatttcttttttaaattattattattatactttaagttttaggttacatgtgcacaacgtgcaggttc

SEQ ID NO: 856 - DNA, 1243 bp, Homo sapiens
ggttcacagtacagagctcctaaaacttgaaatttcctgatagagatgagaggaccatcctttactagtcataagtccctcttagccatacctgagtttatgctattgacatgacatgagtggtggttggagacccgtatggcttcagggtgggtgcttgacaccagaaacatgaaggcataactagatggttaaaactgtcagccctctcctccatcacctctgaggtgctgggagggtgatacaatgatatacttagaggtcatatggcagctttgtgccccttttcaccatacctggccctatgtgtctcttctatttgacagttcctgatttgtatcagacagtaactgtaagcaaagtgctttcttgggttctgtgagccatcttagcaaattatagaacctggggaaggaatccatggaagtgctaatttatagccagttggtcaggagtatggcaggcccacaactcctctctaatggtgggggggtggcagtcttgtggtcctgaaccctgaacttgtgggatctgatgctatctccagatagatagtctcaggattgaattgaattgtaggacaccatttggtgtcctgagagttgaaaaattgattggggtgagactaaaccaacaaatttcatctcagaagtttgagtagaaataattctgttggaaaacattatcgttagatcaaaggtgttaatagaactgagagatcaaaatggcaaagagtcatctatgattacacattgttgacataaactagaattaagacaagagtatgtcaaagagagttacattgagccagggataaaaatagtcaattgattgattagaatttagtaaatgctattttttgaaaaattaatatttagttaattaatggagatacttaattatctccattttgactttaaatttaaaactaaaaaattgatattttatctattttccataaatggaaattgaaaagcaatagcaaaatgcttcgacagaaaatctgcccttcttattcccaagaggaagaatggccaactaccttaagaataagttagaaaaactttcataattttttaagttgccatattttatagctttgaacaagttgaattattaactagactgcccagggaatggagccatctaatataatttccttactatttagataaaatctttgttgttgaaaatcttaatcatttttaatgatcctgttttcagagcctgatattaatgattc

SEQ ID NO: 857 - DNA, 873 bp, Homo sapiens
gtaattccagaatataatcagaagctgattcattatcctcttgagatttcacaatcttttcatcaggaattaaaattcagaagagggtaaatgtatctaatcagttgaaagttaaaaattagaggatggaggcaacatggccgaataggaacagctccagtctacagctgccagcgtgagtgatgcagaagacaggtgatatctgcatttccaactgaggtaccaggttcatctcactggggagtgctggacagtgggtgcagcgcaccatgcatgagccaaagcagggaaaggcatcacctcacctgggaagcagaatgggtcagagaattccctttcctagtcaaagaaaggggtgacagatggcacctggaaaatcaggtcactcccaccctaatactgcgcttttccaacaggcttatcaaatggcacaccaggagattgtatccagcacctggcttggaggatcctacacccacggagcctcactgtttgctagcacagcagtctgagatcaaactgcaaggttacagtggggctgggggaggggctcccgccattgctcaggcttgagtaagtaaacaaagcagccaggaagttcgaactgggtggagcctaacacagctcaaggaggccagcctgcctctgtaggctccacctctgggggcaggacacagacaaacaaaagacagcaataccctctgcagacttaaatatccctgtctgacagctttgaagagagtagtggttctcccagcatgcagcttgagatctgagaatgggcagacagcctcctcatgtgggttcctgacccctgagtagcctaactgggaggcaccccccagtagaggcagactgacatctcacatggcc

SEQ ID NO: 858 - DNA, 2149 bp, Homo sapiens
ggcctgcagcacccagtgagatcaacacagaagtcaggtggttcatgcatttccaactgagcctccactggtgatacccaggaaaacagggtctggagtggacctccagcaaactcgagcaaacctgcagcagagggacctgactgttagaaggaaaactaacaaacagaaaggaatagtatcgacatcaccaacatcaaagaccaaaggtaaataaatccacaaagatggggagaaaccagtgcaaaaatgctgaaaactccaaaagtcagaatgcctcttctcctccagaagatcacaactccccgccagcaagggaacaaaactggacagacagtgagtttgatgaattgacagaagtaggcttcagaaggcgggtaataacaaactcctccgagctaaaggagcatgttctaacccaatgcaaggaagctaagagcctgaaaaataaaggttagatgaattgttaactagaataaccagtttagagaagaatataaatgacctgatggagctgaaaaacccagcacaagaacttcatgaagcatacacaagtatcaatagctgaatcaatcaatcaggagaaaggatatcagagattgaagatcaactcaatgaaataaagccagaagacaagattagagaaaaaagagtgaaaagaaatgaacaaagcctccaagaaatagaggactatgttaaaagtctgaatctacgtttgattggtgtacctgaaagtgacagaaagaatggaaccaagttggaaaaaactcttaaggatattattcaggagaacttccctaacctagcaagacaggccaacattcaaattcaggaaatacagagaacaccactaagatactcctcaagaagagcaaccccaagacacaaaatcatcagattcaccaaggttgaaatgaaggaaaaaatattaagggcagccagagagaaaggttgagttaccaacaaagggaagcccatcagactaacagtggatctcttggcagatagcctacaagccagaagagagtgggggccaatatacgacattcctaaagaaaagaattttcaaaccagaatttcatatccagccaaactaagcttcataattgaaggagaaataaaatcctttacaagcaaatgctgagagatattgtcaccaccaggactgccttacaagagttcctgaaggaagcactaaacacggaaaggaacaactggtaacagccactgcaaaaacataccaaattataaagaccattgacacaatgaaaaaactgcatcaactaatgagcaaaataaccagctagtatcataatgacaggatcaaattcacacataacaatattaaccttaaatgtaaatgagctaaatgtccccagttgaaagacacagtctggcaaattggataaagaatcaagacccatcaatgtgttgtattcaggagacccatctcatacacataggctcaaaataaagggatgaagaaacatttaccaagcaagtggaaagcaacaaaaggcaggggttgcaatcctagtttctgataaaacagatcttaagccaacaaagataaaaagagacaaagaagggcattacataatggtaaagggatcaatgcaacaagaagagctaactatcctagacatatatgcacccaatacaggagcactcagattcataaagcaagttcttaaagacctacaaagagacttaggctcccacacaataatagtgggagactttaacactccactgtcaatattagatagatgagacagaaaattaacaagaatatccaggacttgaactcagctctggaccaagtggacctaaaagatatctacagaactctccaccccaaatcaacagaatgtaccttcttctcagcaccgcattgtacttattctaaaattgaccacataattggaagtaaaacactcctcaggaaatgcaaaagaatggaaatcataacaaacagtctctcagaccacaatgcattcaaattagtatgcaggattaagaaactcactcaaaacctcacaactacatggaaactgggcaacctgctcctgaatgactactgggtaaataacgaaatgaaggcagaaataaagatgttcttcaaaaccaatgagaacaaagacacaac

SEQ ID NO: 859 - DNA, 149 bp, Homo sapiens
gcaaagcctcatgggaattgtagtgtcaccttccaatgatgttaccatcaaggaccttgggaaccagcttttctctctgcgcttgcgccgcccggcccactccgccattttcctccggaagtgcggcacccagaggccgtcctgtagcc

SEQ ID NO: 860 - DNA, 254 bp, Homo sapiens
gaagttaatggaaaacatgtaccctccccctctgggatgatatttccaggggaagatggtaaaggcccgttgttcttatgtttgagggagcgaaaatattttgcatattaccaagtgactagtgtcacacccagtgggtcaccctgctggccctttggttgccccctttcctttggcgcccttgactttcatccttgtagcatgtaccccttgcccatgcagtttcttcatgtctcctaagtcagtggctgctc

SEQ ID NO: 861 - DNA, 1574 bp, Homo sapiens
gttaaccaactaaatgggccctttatcttggccaagggcattttaaactaaacctgaaacagtaatggaggccatgatggaaatgggtggttgaacatgcttcgttatttactttcatccttttggaattcatgcatagctgaacagtgttaacagtaaagtagagacttaagaatgacaaaacagacccttcatagcaataagatgtcaacatgacagatagcaggccttgaaagaaatcaaagtatttcactacaaaaatacatttctttgacatattttgaaatggccctacaaggctgtttctgtggggaaaatctccattttgtagagaatccccttctctttccaagtctttttcctgatttttcctgattccaagtcctttttcctttttatgtctgataaaaatcatttacaatctattctcagtgaagcctgctacctgcaagcttcatctgcataagaacctcggtctctaaaacaccttatcttaacccatacactcctgtctattgattccagtctttagataaattattttagccagttgtcaaatgccaatcagaaaatctttgaattcacctttaacctggaagccttcacccaccccacccccacctgctttgagttgtctagcctttcccgattttaccaatgtatatcttaggtgtactgattgatgtcttatgtctccctcacatgtataaatccaagctgtagcccaacaaccttggcacatgttctcaggatctcctgggctgtgtgacaggccgaggtcactcatatttgcctcagaataaatctcttcaaatatttcacagagtttgactcttttcttcaacatgcattaccactgtagtagctctgaagtggttgagttggaggtaacccaccaacaaccctcctcctggaaatttctcttgaatgaaaatatgggaggagtaaattcttcactgccaaatactatttcaaattctttcaagcataaggtaaattcattatttaacataaaagtcaatcaagaggtaaaaagaggtcacagtttgcttacgtattttctggcacttctttgctattggctgtgtcacttttacccttaacatttctgcaaaaatgtctgcagacatttagggtcaacatattcagatacaaccttacccagaagaccaagaaagagacaccaagagaaacatttatcttaaaaactcttaaggtaatttgccctgatttgcctttgtactgaattgggtcatatgcgtatttttgttcttacttttggcaaagaatcaggctatacttagagtaatcacatcatacctgaatctgaagacgagacagtaaacttagagaagtactgaagccttggaagccttggatatattgaatatgttctatcttagaaagaaaaggtgagataatgtatgctggcagtcaaccaacagcatatgctcctaatgaacaactggagagtcatttaagttcaatgttggggattttattagaaactgtaagatgaatacacaattcattttctctttccttgtaaatttggacaatatttgctatattcg

SEQ ID NO: 862 - DNA, 93 bp, Homo sapiens
gaatttgtcatgattttagctgaaactatttaaatagatcgccgccgggaaaaaaggcgggagaagccccggcaggtttgaagctgcttcttc

SEQ ID NO: 863 - DNA, 16 bp, Homo sapiens
gcgcatgcgcgctggc

SEQ ID NO: 864 - DNA, 249 bp, Homo sapiens
ggagaagcagagcctgggtccccaactgacaaaagtgtcttcccattagcccttgcgctgggcccaggtgtccctggcattcctggttcgagaccagggtgcgcttcaggccgctaggggtacccaaaagcgggcagaaggcccatgaggtgaaggtgatgcacctggggcagagaaaaaaaaaaaacaaccgcgccgcgtataagcggggcctggctcccccacagaagaaactgtcctcacatcagc

SEQ ID NO: 865 - DNA, 1531 bp, Homo sapiens
gcctggagtcatgtctacctgaggcctaatgtagacatgaggcctgggcattcacctaggacctcatgttaagataggggctggagttcttttggtgcctagtgtatacctggggcccagatgtataactagaacctgatgtttcagatggaaacctgggccccaggtgctcatcagatcccacgtgaaaactcaggcttcaggtgcacatcagactccaagtggacacataggccctaggttgataccaagatttcaggtagactctgggtcccagaaaaacaccccgccctaggtggacagctgaacctgagtagacatcaggccccggattgacatctggcctcaggtagattcctaggcccaaggtgaatactcagtctcctgccctaggggaattcagtcttaggtgattaaggactggtgttcctctggggcctcatgtctacctgggccctgggagtgcacatggagccagatgtctataaagggcctgagtgtccactagggcctgaggttcaccaggagcatagacatccacctaggacctcgtgtccacctaaaacctggtgttcacctggggcctgggtgacaacctgggatctgatgttcacctgaggcccagagttcagctggtgcctatgtcagcctggcacctgatacacacgagatgactaggtgcccacctgaggactggtgttcatggggaactggtgttcagctgtggcttgatgagcaactgggtcctggtgtcctcctggcaactgatgtccacctgggacttcatgcttacctagggcctggtgttcccctggggcctggtgtgcccctgagatctggggtccacctgggcctagtatccacttggggcctcatatccatctggaacatcatgtccacttggggccttgtagttacctagggactgggtgtccttctggcacttgggtgtcctcctggggcctggggttctcctggggcctgggtgtacatctctggcctgatgtccaccttgggtggatgtccacctggggacagatgttcacttgtggcttgagtgtccatctcgtgtctaatgtctacctggggcctggtgtttgcctgaggccttatatccacctggggcctgggcatccatttgaggcctgatgtctacctaagacctggtgtttaactggggcacagacttcttcctggagcctgacgttcatctggagcctgaagttcacctgtgcttgttgtctacctgaggcctatgtgtcaacctagtgcctgatgaccaccctgagttcagtgttcacctggggcctgacatctgtctggagtctgggtgtccacatagggcctgatgttggcttgggaccaaagtatttacctagggcctgggtgtctacttacagcctgacttctacatggttcattgtgtcaacctggggcctgatgtccacttaggtcctaggtaagctccttatgactaaagtccacatgggggctgaaaccatctcagaccttgaacctagggcttagtgtc

SEQ ID NO: 866 - DNA, 960 bp, Homo sapiens
ggttttccctgttaacctcaagtctctgatggatctaagaaaagttgtaattttcagtttgttcaaggtgttttttgttgtcgttgtgaggacaggagtgacagcttccaagctggaaaacagaagtcacatttgggttttgtttcaagatatttttccaatgacagagaatgatgccacacacatttccatagatgtcttttgatgcagatgtgcatgcgtttctgttatcctaagagtgaaatacctgagtcctaaatgtgctcctttctagaacctttattcaatgccaaacacagtatcccctccagcagtgatgagagttcttgttgctccagattctctccaacacttggtgttctatcttttacattttagccgttttggaggatatgttatcctgttgtgatgttaatttgcatttacatgaatactaagaaagctgaacacattcaagttttgcttttataaattacacgtttaagtgttttacccattgttctttctcttagtgatttttaagagctctttacatattgttgatgtgagccctctgtcagttctgtgttcatagatctgtttccactctgcaacttgtcttgtcactttcttagtggtgtctcttaataaacagaaattcttaatttgaatatagtctaatttatcaacttattcccttaaaactatggctcattgtgatctgtttaagaaatctgtccccattcatggtcataaaaatcgtctgggcacggtggctcacacctgtaattccagcactttgggaggtcaaggtgggcagatcacctgagatcaggaattcgagaccagctggccaacatggtgaaaccctgtctctactaaaaacacaaacattagccaggtgtggtggcaggtgcctgtaatcccagctactcgggaggctgaggcaggagaatcacttgagcccaggaggtcaaggcc

SEQ ID NO: 867 - DNA, 44 bp, Homo sapiens
gcttcaccgccggctctgggccagggcgctcctataggctggac

SEQ ID NO: 868 - DNA, 1076 bp, Homo sapiens
ggggctgtcagtctagtttggggctgctccctggtgagctggagtggggttgatcttttcaggatctttattgtaaaccagtcattgtcagataggtttctttttcctacttttatctcaagaatgtctgttctttggtatgttatgcgtttttagaaagtttttacttgaaaataagttcaaactctaaaagttggaaaaaataaaaataatacccatatcccatttacttagatatatctgttgttagcatttcattatcattgggcatgccctctctcactttctctgtgtgtgtgtgtgtatgtgtgtgtgtctgtgtgtgtgtctctattcccccaaccccctactatttgagggttaattacatacattgtgcctttttaccaccatttcagtatgtatttcttaatagtaggaatattcttaaaaaatcacaatcctgctatcaacttcctaaacttacatcaatgccatatgtttatctaatgtaccagccatattacagttatgtcatttgatctgatgtccttcataacctaccccttcctccaagtaggttctaggatttagtttttgtcattggtatttttgaagaatagagttcttctcgatatacttgtttttttcttttttcaaacagaaatttccccattttgtttttgataaccccttataattagatgagaggcatgcattattggccagaatactgcaaaatgctgatccatcctcagggtatcacaactggaagcacacattattccactttccctcatgagaatcacctggtcaggctgttgcccaatttctattcccccctcccttgtatctaataaagcagtatgtgaggatactttaagaccatgcaaatatcttgcttttcctcagaatttccttctagatttgaaaaacttactccctaggccgggtgtggtggctcacacctgtaatcccagcactttgggaggctgaagtgggtggatcagttgaggtcaggagttcgagatcagcctggccaacatggtgaaaccctgtctgtactaaaaatacaaaaattagacaggcatggtagc

SEQ ID NO: 869 - DNA, 194 bp, Homo sapiens
gtttgagtccgtccattccattcgagtacattctattccattctattccattcgattccatttcatctgatttcattccggtccactccattgcattgcattccattccattccagtccattccattccattccattccatttcattctattccattccattccactcgagtccattccaaaccattccattcg

SEQ ID NO: 870 - DNA, 396 bp, Homo sapiens
gaatccattccattccattccataacattcgagtccattcaattccattccattcgagtccattcctttccattacattacactaatttccaatccattcaattccattcgagtccattccattccattccattcgagtccattccattgcttttcattccaatgccttcgaatccattccattccattccattccattccattccattccattccattctagtccattcaaatcctttaaatttgaatccattacattgcatagcattccactctagtccagtccacttcattccatccaagtccacaccatttcattccgttagagtccattccatttaattccgttgtattccattcgagtccattccattcaattcctttccattctattcg

SEQ ID NO: 871 - DNA, 443 bp, Homo sapiens
gagtccattccattccattcgcatccattccattaaattcgagtccattccattcgagtccattccattccactccattccattagagtccattccattacttttgagtccattcaatgcaattccttaccattcatgtacattccatttaaattccattccattccattccatacctttcctttccattccattccattctattccaatacattccattccattccattccattccattctattcgagtacattccattcccttccattccaatggagtccattccattctattccatttgagtccattctattctattccattggagtccattccattctattccactcgagtgcatttcattacattccattccattcgagttcatcccattccattgaattcgagtccaatcccttccagtccattcaattccactacg

SEQ ID NO: 872 - DNA, 588 bp, Homo sapiens
gctactttccactccactccaatccactccacaccgttcaattccattccctcccattccattcaattcccttccattctacaccagtccactacaatccattcaaatccattccaccccactgcattcccatcctttccactccactgcacttcacttcaccgaattccattcgattccatttgatttgattcaattccattctattacattctattcgactccattccattccattccattccattccactccactaaattccattccattcctttcctttccactcaattccattccattccattgcattccactctactcctcggcactccactccactccactccattcaattccattctattgctttccactccactccactacgttcaattccattccttctcattccataccattcaactccattccactccactccactccactgtattcaattccattccacacattccattcctctcctttccaatccactccactccaattcaccaaattccatttgatttcattccattccattctattccattccattctattccattccattccattcaattc

SEQ ID NO: 873 - DNA, 324 bp, Homo sapiens
ggcagcgaggctgggggaggggcgcccgccattgcccaggcttgcttaggtaaacaaagcagctgggaagctcgaactgggtggagcccaccacagctcaaggaggcctgcctgcctctgtaggctccacctctggaggcagggcacagacaaacaaaaagacagcagtaacctctgcagacttaaatgtccctgtctgacagctttgtagagagcagtggttctcccagcacgcagctggagatctgagaaccagcagactgcctcctcaagtgggtccctgacccctgaaccccgagcagcctaactgggaggcaccccccc

SEQ ID NO: 874 - DNA, 1383 bp, Homo sapiens
gctttgcttattctacaaaaagactgtttcctatctgctcaatgaaagaaaattaaactctgtgagatgaatgcatgcatcgcaaagtggtttctcagaatgcttctgtctagtttttatatgaagatatttcctttttcatcacatgcctcaaaccactcaaaaacatccatttacagattctccaaaaagactgtttccaaactgctcaatcaaaagaaagattcaagtctttgagatgcatacacccatcacaaagaagtttcccagaaaacatgagtctagtgtttatatgaagatatttccttttgcaccataagcatcaaagcattcaccaatatcactttgcaggttctacaaaaagactgtttccaaactggtgaattgaaagaaattcaaccctgtgagatgaatgcacacatcacaaagaagttcttcagaaagctgctgtctacattttatttttcgatatttcctttttcaccattggattcaaaccactgaaacatatcactttgcagattctacaaaaagactgtttccaaactgcccaatcaaaagaaaggttcaactctgtgagatgaatgcacacatcacaaagaagtttctcagatagctcttattattttgagatatgtcccatcaatacctaatttattgagagtttttagcatgaagggttgtggaattttgtaaaggccttttctgcatctattgagataatcatgtggtttttgtctttggttctgtttatatgctggattacatttattgatttgcatatattgaaccaggcttgcatcccagagatgaagcccacttgttcatcgtggataagcttttggatgtgctgctggattcggtttgccagtattttattgaggatttttgcatcgatgttcatcaaggatattggtctaaaattctcttttttggttgtgtctctgccaggctttggtatcaggatgatcctggcttcataaaatgagttagggaggattccctctttttctattgattggaatagtttcagaaggaatggtaccagttcctccttgtacctctggtagaattcggctgtgaatccatctgatcctggactctttttggttggtaagctattgattattaccacaatttcagatcctgttattggtctattcagagattcaaatttttcctgggttagtcttgagagggtgtatatgtcgaagaatttatccatttcttctagattttctagtttatttgcatagaggtgtttgtagtattctctgatggtagtttgtatttctgtgggatcagtggtgatatcccctttatcattttttattgcatttatttgattcttctcttttttcttctttattaatcttgctagcg

SEQ ID NO: 875 - DNA, 147 bp, Homo sapiens
gccgccgtgagcccacactcctcagcccttgggtggttgatgggactgggcgctgtggagcagcgggcggcgctcgtcgcggaggctcgggcatggcgggctgcaggtccctagccctgccctgcaggaagacagctaaggccaggc

SEQ ID NO: 876 - DNA, 526 bp, Homo sapiens
gcagaagccaaatagaaaacggaaacgcccgagccggctttgctcctagctgagggtggcttggctgggtccttccccatggggtctgttccagggagtggaatccacttcgggaggagcttgctatgaaccggcaagctcaggcagagagcagaacagcaccatagcaccgtgtggctcaagccggcattcttggaaccggaccctgcggtttctctcttacttcatcttgttaaatcggtcctgataattggggcggataccagagatagcagcagctccttcacgctgcactgccatgaaatattaagcccttgcgagctccatcctcaggcggcagcgggaggaggcggagatggaggaaaagtgggcgaggaggaagtatctcctcctgggctgtgacctcacccaagccccagtctgtgtcttggaaacatgtgtttcaaagttggcttgaggcgctgttaggagaaggtgttaatttcacctcctaagaactggctgcgttgtatagtaaaccagatac

SEQ ID NO: 877 - DNA, 647 bp, Homo sapiens
gcacaggggactcacgcacctgagttcgcgctcacagatccacgcacaccggtgcttgcacacgcaagggcctagaactgcaaagcagcggcctctctggaccgcctccctccggccctcctgagccctactgagccctgctgagtcctggaggccctgtgacccggtgtccttggaccgcaagcatcctggtttaccatccctaccctggctgacctgagagctggggatcttttaagctttgtatgcctggcctcaccttttcctctgcctccctcccagaccagcccggctctcagacacctctgctttctaggcaaaagttctggagcccagagcaagggccacaggtgcagtgcagtccaaacaggaccacgagcaattctctctccttcatcctcagatttggcagtagaagcttgtttttcagaacagggctggagtggcctctttgaaactctgaacatgtttcaactgtagaatagagccataatgggtgatcttggaagctccgtgggccaatcaggctctgccccaatacccgagccctctgggtgtcctggtccacctcagagcagaggtcctgggagcccctgctggcagggaggctgtgatgggtgagaacagccctcctccgtgtgtcctcc

SEQ ID NO: 878 - DNA, 31 bp, Homo sapiens
gacgcccagcaagacggcggcagcgcagcgc

SEQ ID NO: 879 - DNA, 149 bp, Homo sapiens
ggatgggccaggtagccaggcaggagaaagattccctcttttttttttttttttttttttttttgagacagggtctcactgtgtcgcccaggctggagtgcaatggcgtgatctcggctcacgggaacctccgcctcccgggttcaagc

SEQ ID NO: 880 - DNA, 482 bp, Homo sapiens
gtctcagggttgctgccgaacgagccatgaactgggctgggtttttcatatttgatgaaagagcctaaacgctaactgatttgggagaggtcggataaagaaaaaggagcattaaccttgactatgcctttagctccagccaccctttttaagaggaaattgctgggctggtgggggagggctagtcacggaacgaaactgtaagccagactggtgtgaggaggggaggtgataaaaggattataaggtggaagagcggaggctgaggaagaattgggacctagctcagcctggcgaggaggggaggggtcagatgggtctgtagaaaaggaagattagaaggactcagcgatgcttggggttgggactgaggggacaggcaggagggaaagaaggaagatttgggacgacttgcattgggaacagagactagagagggactgatgtgtaaaagaatgcctggatgtcaggcacctcagacc

SEQ ID NO: 881 - DNA, 672 bp, Homo sapiens
gcctttggtgagcaccggctctgcagctctgcgggtgcaggggaggtgtactgcgtaggtgccccaggactggcgggggctgagggtccatgcgaacggcactactacgcaggcgtcgcaggactggcccgggctcaaggtccgtgcaaactgcatgcactgcgcaggtgctccaggactcgcgcggggtcaaagtccatgcaagccgcacgcactgcacaggtgccccaggactggcacgggctcagagtccacgcataccgcacacactgcgcaggcgctccaggactggcgcgggctcagagtctatgcaaaccgcatacactgtgcaggcgccctaggactggcgctggctcagggtccctgcgagctgcacgcactgcgcaggcgccccagagctggtgtgggctgagtggccacacgagccacatgcactgcgcaggcgccaggaggcccttcctctcaatccgagctttgcagatgaaggactctgcgtgtgttgccttctgggcttacgggccgagtgccctttgagattcaactttttctaaattatccttcactttctgctgtaaagagtggccacctcctttttcctctaggggactgaagcgagaggaggatattgcagggtttgcctctgtggtcatcttcttagagagcaccccctcc

SEQ ID NO: 882 - DNA, 333 bp, Homo sapiens
gcctgtgggatgtgtgggctgactcgtacattaggatgtgtgtcaatctgaaataacctggccgttatatggatgccttggggcttggggggtttctggcagtctgtcgagcccgaggtgaatgtccccaaggctgctggtgaatcagatccctggcgttctccgttggcagttcagcccaacagtttctctgccggccgtgcctctgcaggtccctcctctgatctgattggattaatatttgaatcaatagactgagtcaagcagaatgtgggtgggcctcatgcaatcagctgaagccctgaaaagagcaaaagggctgccccttccccc

SEQ ID NO: 883 - DNA, 157 bp, Homo sapiens
gcctcagatgaactgacatgcaaatgagagatgaaacggggacgagccgggcagctgatctcagtgcagcaactgggacacctcggggcataagccgggcagggaggcggcaggaactgggccccagggggccaagacttcctgagaggctgggccc

SEQ ID NO: 884 - DNA, 435 bp, Homo sapiens
gaccccaacatccacgacgcacactgagaccacagggcacacagggccgccctccatggggagcagctgtcctcgaggctgatcttgcttttccttcctctgagacggcttcctctcggctcagcctccttgggacgggggtgccgtcaacccagctgcttcctcttctctcccgatgaagggatggctcaaaagtgccagcagcacgagccatggcagacacacagctcagggcctcaggctctgcttccttccactcccaggcctgacagaacccacagggctcaccgcatgcgcacaggcaaccagggcacaggagcagcagggccttccctcccctcctgctgctcacgcagctcctgctgtgcttttcaggcagctccttcatgtcttattcccattttaagaaatggaactcaaaatgtttggacctcc

SEQ ID NO: 885 - DNA, 31 bp, Homo sapiens
gagcgcccggcttgcgcgcccgcggcgcccc

SEQ ID NO: 886 - DNA, 34 bp, Homo sapiens
gggaaacgcgctgggccggcaggacggcctcccc

SEQ ID NO: 887 - DNA, 200 bp, Homo sapiens
gggtctgtgaccttcgtcttgtgtggggagggagggcggtgacgggccgcatcgggcaggggcaaggcacagccgcgacccccaggctggtgagtcagggttctgtgctgcttggaagccaagtgttgtacaaacaccgggcgtgttgattctggaatgttccctatgtggcgataacgccggtgacggcagccactgtc

SEQ ID NO: 888 - DNA, 637 bp, Homo sapiens
gtgcaggtggtcttggtgtccaggaggcctcacagtatccactcaccgccgtctccaccccctcaggcacaggtccctgtcctcatcctcatcagtgcggtcccacaactcaggtgcggcccccactccccttcccgccaacccccttccccggccctgccgcccttccccgcccagagggaaacatgagcatctcagaacaagagacaaagcccaggcattcagggaggataaagggggaacgcagcccccaccaaaatcttccccagacacaatgaggttttatcagcccattgtattaagcggaatacgagtcccataaagcccccacaccctgctccctcccaggaatgtgtggctctgtgcagaggggactggtcactgtgatgaaggccaggcactctgacacgggaggtctggttatctgctggtaatccttaggggcccttatccagggaggcaggagggcccgggggaggcacaggactgcagcagggactgtgggcggggaaagtgggagagcgattctcctggggggccaggaggagcgggccctgcccaccccaagtgactccttaggagccatgagataatgaatctttttttttttttttttgagatggagtcttgctctgtc

SEQ ID NO: 889 - DNA, 299 bp, Homo sapiens
gcggggacccagggaacacctgtctcctccacttgctggatttgtgactgggcggcaaacattttctaaagtctcccgctacgacccctcggctgtcaggagacttctgagaaagccgggcctcttttgccccagcgaggagctttcttgtgaagaggcagttcccggagggaggcgtctgtgctttgtaaagtttagcctcatgtgctgcctctgaggaggagttcagagaacatccgcttcctttctgttatcatctcagccttccagccagaaagaaggaagcgtccatggatccc

SEQ ID NO: 890 - DNA, 53 bp, Homo sapiens
gcagggggcggcgggggcggcggggggcggcggggggcggcgggggcggcagc

SEQ ID NO: 891 - DNA, 54 bp, Homo sapiens
gcccttttttgcccgccgtggctttttgccccccgcggctttttgccccccgcc

SEQ ID NO: 892 - DNA, 55 bp, Homo sapiens
gccgcggctttttgccccccccgccgccgcggctttttacccgccgccgcttttc

SEQ ID NO: 893 - DNA, 492 bp, Homo sapiens
gtgtgtttaactgtggctgcccttaatgtttttatcatccacagacaattgttgtctcattttggtcctctttaaatgatggttttataatcagctataaaatttaatagatgcccttaaatgcaggattctgattaatgacgctggagattgtgatattagaatagagggaaaactttcaaatagaagagtgaatggtgtttggtctactttggactgtatttttataaatatgttattagtatgtgttccaaaattattggaaacttctatagaaatgtaatccccagtgtcagagacggggcctgctgggaggtggctggtccatgggagcagtttccagtggttcccagtgtcggagaaggggcctgctggaaggtggctggtccatgggagcagcttccagtggttcccactgtcggagatggggcctgctgggaggtggctggtccatgggagcagtttctaatggataagcataatccccctagc

SEQ ID NO: 894 - DNA, 33 bp, Homo sapiens
gggctggcgacggtccccgcgggggcgggaagc

SEQ ID NO: 895 - DNA, 628 bp, Homo sapiens
gggttcaagcaattctcctgcctcagcctcccaagtagttgggattacaaacatacaaacacaacaaaaacaaaaaacaaacaaacaaaaacacttttatttaggtctaggggtacatgtgtgggtttgttatataggtaaactcatgtcataggggtttgttgtacagattattttatcacccaggtacaaagctttgcacacaataagttatttttttctgatcctttccctcctcccaaccttcacccttaaagaaaatgtgccacatatgcatggaatactatgcagccgtaaaaaaggatgaccaccatgcctggctaatttttgtatttttagtagagacagggtttcaccatgttggccaggctggtctcgatctcctgacctcatgatccaccagccttggcctcccaaagtgctgggattacaggcatgagccactgcacctggccagttgactgcttttgtaatcaagaaaccttgtgatatataaatagccactttccaaaaaaaaaaaaaaatcaccagaatacctccagtattgacaagctgtggggtgttgagagaattcgagattgtcttagcagcctgggacctttccgtagtcctgaacagaacagtggac

SEQ ID NO: 896 - DNA, 150 bp, Homo sapiens
gttcgaatgggtcatcgctgccacggggggcatgcgattggcctgaggttatccagaggcaccaaagctggcggcacccgaccccccggccggggccggagaggggctgactgggttggttttgatctgataaatgcatgcatcttcccc

SEQ ID NO: 897 - DNA, 760 bp, Homo sapiens
gttttattcctcacgattgctttggccattcaatatttcttataggtttatatacattgcagactttattttctattactgtaaaaagtggcacaggaattttgataggaagttgaattaatctacagattgctttggataatatggcacttagacaatattcttctaatccataaatatgtaatatatttacatttatttgtatcttctttattttgtatcaatatattttatttttatcgtaaagatctttcaccacattggttaaatttattgctaagaaatctattattttgttgctcttgtaaatgagatttttttttttttactggtttgttgctagcatatagaaacaaaactgatatgtgtatgctaattgtatattctgcttctttactgagtgcatttattagatacactatttatatatagatgcattaaatacattatttaaatgtactatttatgttttttatatataacattatgtcatctacagacagtgacgttatttcttcttttcaatatggatcttttagcttttcttgcttaattatttgatgtaggacttaattattctatgtaggacttccagttctatgttaaaatagaaccgttagaatgggcataatgtagacttgcattggtgtttgcacatttgaaggagcaaacgcctcttttcatttgttgttgttgttgttgttgttttgtttttgagacggagtctcactctgtcacacaggctggagtgctgtggcac

SEQ ID NO: 898 - DNA, 1490 bp, Homo sapiens
ggctctctctccgctagaagagagtcactcaggttaaaacaaggtagggtatcacaggaccatgtacaattattcaagctccagcttcaactctctttcttattgctctcttaggacagtatatttagatgggagtaaatgaaagtaatgttattaggggataagattaaaatcgatcccacttgtaaaaaagggagtagactatttgtgagctataatacttttttttagtgaagaatcaccttaaaacttggaacctggatataagataattccttcattctgcaaatgtttagtagcaaactatatgccaggactgtgataatttctagggatacatgattgaatatatagtataagatgccttggagtgtcagatagtttcatataaatggctcatgaagtatatagacagtgtggtaaaaagagactactgagatgtgcagaggagagacaataaagggtctttgaatggtagatgaatgtgtttggacttttcactcagggctgttgaagtttttgaaggtcagtggtcttagagttttggtgttttcaagccctgctaagtactttgtttctagctgatgattggccaccattactgatcatctactggctctgtctgattcagcaatcccaccgctgagtatttatgcaaaggaaaaaaatcaatgtatcagaaagataactgtacttttatatttgttgcaacactattcacagtagcacagatataaaatcaacctaaatgtccatcaacaaatgattggaaaaagaaaatatagaaaatatacacaatgaaatactattcaggagtaaaaaacaatagaatcataatttttgcagacacatgggtggaactggaggccattgttgtaagtgaagcaagccagacacagagtaaacatcgtattttatcactcataagggggtgctaaaagatgtgagggtattgatgtagagagtggaaggataatggagactcagaagggtgaagggatggaaggggtgaacagtgagaaattacttaatgggtacaatgtgcattattccggtgatggatacctaaaagccctgacttcaccactatgccatccatgcttacagcaaaattgcacttggaacccataaatttatacacaaaaagtcttagacttctctctcttctctcataagcctcagagctcagtgatccccttggatctcctcagcctgctgagttttaactttcctacctaaggtgattttgggcagagacaagggagtgtttcaggaagatattctcaggcacacacttctaaagaaacattggacactcttctagtggcttttatctagtcactgctttaagcaaggaataaaacacctgtggctaaaattttaaaaactatgtttcctattcaccctttagacctgacagaagagattttaggattttaagggaacagctttttcctgacccaaaagggcacagtagtgcaaaggccaac

SEQ ID NO: 899 - DNA, 330 bp, Homo sapiens
gtggaagcaactcatccacacacattttctccagaggctgctgcagtctcgccacatcttcaagctctgtctctgattctagtgctcttgttatttccaccatatctgcagttacttcctacacagaagtcgtgaacccctcagtgtcatctgtgagggttggaataatcttcccaacttctctccctctcttttttttttttttgagatgaagtcttgcctgggctggagtgcagtgatgcgatctcagctcactgcaacctccacctcccgggttcaagcaattctcctgcctcagcctcccaagtatttgggattacagtcaccccc

SEQ ID NO: 900 - DNA, 1554 bp, Homo sapiens
gctcagaaccccccagcagtgttgtggaatcctgtgtgagggacaaacattgagatcacaggaggtgtgtcctggaatcctttgtgagattcagaccacagcagcagtgttctggaatcttatgtaaggaacaaactttcacaccatagtaggagtgttctggattcctatgtgctggacaaacattcagaccatagcaggagtgttttggaatcctctgtgaggaacaatcattcagaccacagcaggaatgttctggaatcctttgtgagggacaaacaatcagaccacagcaggagtgttctggaatcctacgtaagggacaaacattcagatcccatctgcagtgttctggaatcctatgtgaggaacaaacattcagtccacagcagcagtgttctggaatcctatgtgtgggcaaacactaagaacccagcagcagtgttccagaatcctatgtgagggacaaacaatcagaccctcttagcagtgttcctgaattctatgtgagagagagacacttgcaacccagcagcagtgttctggactcctatgtgagggtcaaacatttagaccacactagcagtgttctgtaatcctatgtgagggaaaaactttcagagcacagcaggagtggcctggaatcctatgtgagggagaaacattcaaaccctcgtagcagtattctggaatcctatgtgagggacaaactttcagaccccagcaactgtgttctggaatcctatgtgaaggagaaatgttcagaccacagcatcagtgttctggaatcttaaatgaggaacaaacattcagaccacagcaggagtgttctggaatcctatgtgagggacaaacactctgaccacagcaggagtgttctggaatcctacgtaagggataaacattcagatcccatctgcagtgttctggaatcctatgtgagggaaaaactttcagaccacagcaggagtgttctgtaatcctatgtgagggggaaacattcacaccctcgccatggtgttctggaatgctatgtgggggacaaaccattcagaccctcgtagcagtgttttggaatcctatgtcagggacaatcactcagaccatagcagcagtgttctggaatgctatgtgaggcacaagcagaccacagcagcagtgttctggaatcttatgtgagggcaaacagacccctgcaaacagggataatttgacctcctcttttcctaattgaataccctttatttctttctcctgcctgatagccctggccagaacttccaacactactttgaataggagtgatgggaaagggcatccctatcttgtgcctgttttcaaaggcaatgcttccagtttttgcccattcagtatgaaaatgtctgtgtgtttgtcatgaatagctcttattatttttacatacatcccatcaatacctaattcattgagagtttttagcatgaagggctgttgaattttgtcaaaggccttttctgcctgtattgagataatcatgtggtttttgtctttgattctgtttgcatgctggattac

SEQ ID NO: 901 - DNA, 675 bp, Homo sapiens
gatttggatttcctctatttccttcttttgtctgattgctctggctaggacttccagtactatgttgaagaggagtggtgagagtaggctcctcgtcttgttccagttctcaaagggaatgctttcaccgtttccccattcagtattatgttggttgtgggtttgtcatagatggcttttattacattaaggtatgtcccttgtatgcctattttgctgagagctttagtcataaagcaatgctagattttgtcaaatgttttttctgcacctgttgatataatcatattagttttttttaattctgtttatttggtgtatcacacttattgacttgcatatgtgaaaccactcctatatcattggtataaaacccacttgatcatggtggattattttttgatatgttgtcggattcagttagatagtattttgttaaggattttggcatctgcgttcatcaaggatattggtctgtagttttcttttttggttatgtccttccatggttttggtattagggtgattctggcttcatagaatgaataagggagggtttcttctttctctgtcttgtggaatagtatgaaaagattggtatcatttcttccttgaatgaaagaagacattctttgaatgtctggtagaattctgctgtgaatctgtctgtccctc

SEQ ID NO: 902 - DNA, 2173 bp, Homo sapiens
ggtttccagttcaaggatactttctacagcagaataataacactagcaaagagctagtacaaggatggttttgtgctcaactgaaatccagctgaatacagaattgtataggaaacagttaatatggtgatagaatagaaacagtagcaatcgtgaactaaatcatactatgaatgcctaaactactgctgtaacttttggaaaaatgataataccactttattgctttttgaagtatgaatattttagtgtatatgctctagacttcaaactctataaagagtctcaaagaagttggctggataaagcctgctgtagatgtctttatattcaaagattgatgatgcaatttgaatatgtgtccccaccgaatctcatgttgaattatatttcctaatgtggaaggtggatcctggtataaggtgattgaattatgaaggcaaatttctcatgaatggttcagcacccaccccttgtaccatcctcacaataatgagtgacttctcatgagatgtagtcactgaaatctctatatcacctccccactctccgtgttttccccttgccatgtgagacaattgattctttctttgccttccatgattattgaaagatttctgaggcctagaagcagaagcactgtgcttagaaccatgagccaattaaacctctttttcaaaataaatcatacagaaaatggcaaatgaggactggagcgttgctttaaagatacttggaaatgtggaagcagctttggaaccaggtaatggacggaggttggaagagtttggagggctcaaaagaagacagatgagaaaacttttggaccatcttagagtctggttcaatggttgtgacaaaaatcctgacagaaacatggacagtgaaggccaggctgaggaggtctcagagagaaataagaagctttctggaaaatgtcttccttttggatatggaaagcttacacaatgcctgctttttatttcagagactcataggcaaaagagactgtagccttgacccagatgagactttagactttataactttgagttaatcctgaaataagttaagactttgggagactgctggcaagacatgtttgtattttgcaatgtgagaaggacatgagattcatcgggtcaaggacagaataatatggtttttgtctatgtccctaccaaaactcatgtggaattatattttgtaatgttacaggcaaggtctaggtggaaaaagatttagtcataaaatggtgcaggtagatacttcacgaatgataaagaaccatcaccttgatgctatcctcctgacaatgagtgagttcccatgagatctggttgtttaacagatctcatcctcctgctcctgctttaggagacatctcattgtcccttggctttctgatataatgaggaggcttcctgattcctcccagaaacagaagacactatacttccttcacagcttgcagaaccatgagtcaattacacctcttttatttacaataatacagaaaagtagaactgcagagaggagctgtgaaatgccttcaaggcctttttccctttgttttggctattagcacagggcttctttatatacaaatttctgaaatcttcctgaatgtttccccttaaatgggatttttgttattgcatcatagccaacctgctatacagatttctgaaaaagtagaagcagactcagtagtgggtagcaaacaaagattggaagggtttggagggattagattatgacagggagtgggagggagtgatttaatcatggatgggtgggggtgtatgtggaagggaaaaaggggtgggtagggtggaagggaaaaaggggtggatagggtgggagggagtagactggctgtacggtggtgggagggtggtgggtagtaggaaggggtagtagcctgctgcagaggcagagtctcatggaaaatccctactagggaagcgcacctgtggctttgcaggtttgagccccaatggctgctctcatggactggactagtgttgagtgcctgtagcttttccacacggagggtgcaagctgttggtgggtctatgtatctggggtctggagggtggtggccccctgcatgggggctccaagtccatattttccttctgcactgccctagtagaggtttcccaagaac

SEQ ID NO: 903 - DNA, 1889 bp, Homo sapiens
gggggggtgcctcccagttaggctactcaggggtcaggaactcacttgaggagcctgtctgcctgttctcagatctcaagctgcatgctgggagaaccactactctcttcaaagctgtcagacagggacatttaagtctgcaggggttattgctgtcttttgtttgtctgtgccctgcccccagaggtggagcctaaggaggcaggctggcctccttgagctgtgttgggctccacccagttcgaacttcctggctgctttgtttacttactcaagcctgagcaatggcgggcgcccctcccccaggtccactgtaaccttgcagtttgatctcagactgctgtgctagcaaacagcgaggctccgtgggtgtaggatcctccaagccaggtgctggatacaatctcctggtgtgccatttgataagcctgttggaaaagcgcagtattagggtgggagtgacctgattttccagatgccatctgtcacctctttctttgactaggaaagggaattccctgacccattgtgcttcccaggtgaggtgatgccttgccctgctttggctcatgcatggtgtgctgcacccactgtccagcactccccattgagatgaaccttgtacctcagttggaaatgcagatatcacctgtcttctgcatcactgacgctgggaggtgtagactggagctgttcctattcggccatgttgcctccatccactaatttttaactttcaaatgattagatacatttaccctcttctgaattttaattcctgatgaaaagattgtgaaatctcaagaggataatgaatcagcttctgattacattctggaattacgatttgatcacccatccaagaatgcatattcactttcctttacattacacacatgcataataccatgctgagtgatgctggaaaaagtgagtcttcagtaatgccctcatgaaattacagtctcactacaccgaggtattttctttttaaccctttttttcttttctgctgtgaatatgtgccttctaagaggtgaacaactgggaaaaactgaaaaagaaccttcatctaattcagtaactagcttttgtatcttctaagaatttttatctccagaaagctctaatcttcattcctttacaagctttatttctctctcctttccaacaccagacttttctctgtttgttttctataccttttttagagatgcctacaatagaaaaaaactatgacatattcaatacatctgaaaagtttgcattgccatagataagaatgaattgtctgtttataaagaaaaaaaataaaaatatgaaccaagaaagcacagaaggtagtaaccacatttagatgtttatcatggaatcatctttataatccatctgttacaattccacagagcaaattacaagtaattgtgaagtttcccctcattttataggtttggtcttataaggcatacaacacaaattttaattacttttctttttggtatttggatcttaatttggtcaagtggccactgggtagataatggagcctcttgagacatacagtcttctagctttgttgatgtaaatattactgtgtagttttcattcacttattattttacaaggcatgcttcattaaaaatatgtcagcatctcattgacaaatcacaaaatttaaaaggcacaagaaaaaaacaatttatttgaaacattcctgtgtaaaagtagtcaccactcttactattcctcaaatatttttattatatttaaacacaagcctagttttacctcgagtgtctgaccttgatgatattgtacactttaaacttagaaaaaaaattgaactctattggaaatttcctacagatcagcttttctagatgccaagc

SEQ ID NO: 904 - DNA, 589 bp, Homo sapiens
gcgtgaaaaaatgagagccaactcctgttggttgttctgtccacctccctctctcactcctccttctgcctttgctgtggtcccatggtgtttctgtctttctggggacctgagattcagtgtaggagtgaagtccatgattttaaagccttcatgtctctgctttttaactctgcctgctttgctaagctcttataatgagaaataaaccattcagaacagaaaaaacagggcatcagaaaaccaacttcaggcagagctccggcaagtacctccctagaggggaagggcttactaaaggagatttaatcttgaaaaggccaaaatgagaagctctaaccttaagcttgctaggttttctgggactcgagctggctatatattatggaccattctagccacacacatacacacacacacacacacacaaacagacacacttttttgagacagagtcttgctctgttgcccacgctggagtgcagtggtgtgatcttggctcactgcaacctccacttcccaggttcgagcaattctcctgtctcagcctcctgagtagctgcgattacaggtgtgcgccaccataccc

SEQ ID NO: 905 - DNA, 107 bp, Homo sapiens
gccattttcatccggaagtgcgtcacccagaggcggtcttgtagcggggccggcttggggcttggttctatgtccctgcgggtcggtgcgagggcgaagaggaaccc

SEQ ID NO: 906 - DNA, 215 bp, Homo sapiens
gcagtgaaattggtgagtttggtggtgatttctgggtgcctgcaacggactctcgctgaagtgtgggcgtgtttggagagtagctgggacagacaggcgagtccctgagggttggagataaagacatgttggagactggggagtaactcagtgacagttgtgggcttggtggtgatccccaggttcgtggaactgacctgcgctgaaatgttggc

SEQ ID NO: 907 - DNA, 215 bp, Homo sapiens
gcccacatttcagcgcgggtcagttccaggaaccctgggatcaccaccaagcccaccactttcactgagttactccccagtctccagcacgtctttatctccaaccctcagggactcgcctgtctgtcccagctactctccaaacacgcccacacttcagcgggagtccgttgcaggcacccagaaatcaccaccaaactcaccaatttcactgc

SEQ ID NO: 908 - DNA, 409 bp, Homo sapiens
gatgttggtgatgagcatagctaacatatcctaggcattttccatgtaggttataataagcaccctatataaatcgtaccatttaattcttcaaccctaaatggtactattactaaccacattgtatgagatgaagacactgagattttcatcaaaaccatggaaagccaacgtgaggagcccctgtgtgtctcctttgttaatgcctctgggcatcatggcatgtggattgccatggaatggggattaggaagggcagcactgtgaaaacaccagaaaatatgttatgatagtgggtaaggacgctcatctctgcacattgagatggttttgtttctgagtcaggtttgagatgagccaatcctgactccgtggtgctaccagggatcacgaatttaataagatcttc

SEQ ID NO: 909 - DNA, 211 bp, Homo sapiens
gctgcacgactccctccacgcctctgccctgtttcctccatcagacagggctagcttcctccatctctatagggaaaaagcctgcccagagttcaagaccctcctcagatgccgcctccacgattaggcttcttcctgacccctgagcctgtaacacgcgcctgtaactctccacctcagcccacattcccacagcactcgcgacgtccgc

SEQ ID NO: 910 - DNA, 64 bp, Homo sapiens
gcgcaagggcccagcaggccgtcacgctgcggttcccagtcctcccggcttttgcctgggtgcc

SEQ ID NO: 911 - DNA, 1079 bp, Homo sapiens
gtgagtgatgcagaagacaggtgatatctgcatttccaactgaggtaccaggttcatctcactggggagtgctggacagtgggtgcagcgcaccatgcatgagccaaagcagggaaaggcatcacctcacctgggaagcagaatgggtcagagaattccctttcctagtcaaagaaaggggtgacagatggcacctggaaaatcaggtcactcccaccctaatactgcgcttttccaacaggcttatcaaatggcacaccaggagattgtatccagcacctggcttggaggatcctacacccacggagcctcgctgtttgctagcacagcagtctgagatcaaactgcaaggttacagtggggctgggggaggggcgcccgccattgctcaggcttgagtaagtaaacaaagcagccaggaagttcgaactgggtggagcctaacacagctcaaggaggccagcctgcctctgtaggctccacctctgggggcaggacacagacaaacaaaagacagcaataccctctgcagacttaaatatccctgtctgacagctttgaagagagtagtggttctcccagcatgcagcttgagatctgagaacgggcagacagcctcctcaagtgggttcctgacccctgagtagcctaactgggaggcaccccccagtagaggcagactgacatctcacatgcccgggtacccctctgagtcaaaactttcagaggaacgatcaggcagcagcatttgcagttcaccaatatccactgttctgcagccaccgctgctgatacccaggcaaatagtgtctggagtagacctccagtaaactccaacagacctgcagctgagggccctgactgttagaaggaaaactaacaaacagaaaggacatccacaccaaaaccccatctgtatgtcaccatcatcaaggaccaaaggaagataaaaccacaaagatgggaaaaaacagagtagaaaacctggaaactctaaaaatcagagtgcctctcctcctgcaaaggaatgcagctcctcaccagcaatggaacaaagctggacggagtatgactttgac

SEQ ID NO: 912 - DNA, 108 bp, Homo sapiens
gctggcaagccaggggactgatcgctggaaggaaatgggaccgcgcgccgcgccgcctgagccgggctcagtcttcctccccctgggcgaggcgagcacaggcctggc

SEQ ID NO: 913 - DNA, 334 bp, Homo sapiens
gcccatgaggggaaggtgaggtttgagggaggagaggtgaagcaactgtggcagaaaaaaataaaaaacaccacgccgcggagagggcagagaaaaaaaaaaaaaaaaaaaaccctgccgcggagaagcggggcctgtgtcccccacggacaaaagtgtcttcccatcagcccctgagctgggcccaggggaccctggcatccctggttcaagaccagggtgcacttcaggcctcttggggtaccccatggtgggcagaaagcctatgaggggaaggtgaggtttgagggaggagaggtaaggcacctgtggcagaaaaaaaaaaaaacaaacc

SEQ ID NO: 914 - DNA, 363 bp, Homo sapiens
ggcattgccacagcccgtggagctggacagaaatccaccaggcactaaaataagttagatggaagacgggatggatttgaccaaattcctatcagcatctgctcagtataattgcaacattataatcagagcagaaagaagcccagagattattttgtcttcaaggatcattggcctcagtattatctccatctgaagctgtgttgtccaaagcagattgactccagccggccagctcagaagagggccgactctgggctggcgactccttgagaagggctctctctggtcccaggtggtatttacttaaccgtatcatcatctgcttcattcgtgttcccttcatgtccatcatgtgaggac

SEQ ID NO: 915 - DNA, 125 bp, Homo sapiens
gcatgcctgtaatcccagctactcgggaggctgaggcaggagaatcgcttgaacccaggaggcggaggttgcagtgagcgagatcgcaccactgcactccagcctgggcgacagggaaagactcc

SEQ ID NO: 916 - DNA, 366 bp, Homo sapiens
ggccaggctctgcccacagggtccctggctcctcccatgaggtgacccgatagaactggctgtgccccttgaccaggggctccagcccttgtcaagccctccctgctagcccctcaccagccgtcagctgccctccctcccttgcccgttgggccctgggggggtgatggctccgcggtcgcctgcccagagagtacaccactccccatgctgccccccgacctggctacaccctgaaaaatgtggcttaccaaaccctcccacatgcacagcctgagaagcgggctgtgccttgctggtagcagaccgaccggctgcctagccctgctcaactctgcctctgcacccccataactccctatcagc

SEQ ID NO: 917 - DNA, 385 bp, Homo sapiens
gtgactaagactcattgtgtcttgaatgtgcagagatggataggaggagctcgggggttagtgacattgaggccacatgagggaactctcgtgaacactcagttgaagggttctggagttgggaggctagtgaaccagtcccaccagtgcagggctgacggccctgtgtccagagacccccaagcccagcctgttccttgagccagggctgccgtgcctctgcccagcctccagctcacgagggctggcttagcgggattcatgtgccaccccctcggtgacatctgagaccatgcacgtcttggttgtgccttgttgctctctgctgctctacacagggagacaggccggctggtcgcctcgggggttatcttccctggccccc

SEQ ID NO: 918 - DNA, 281 bp, Homo sapiens
ggcagcctgagtgccacctctccgagggcacagccaggagtttccagatgtccaccctcgcggacctgtttttcgtatacatgtttgctctggcggcgtgaagtgagtggggtcttagtaattgaatggcaggaaccattcccagaggccagtctagggtgggagggggtctccaggggccatccaaagcctcaaagggcatctagcaccagagagtgaggacctctgcagcatctgcccaggctccgtgagcacggctttggagatgcatttggggggac

SEQ ID NO: 919 - DNA, 198 bp, Homo sapiens
gtcaggtgcagcttccagcgcccgaggaggcccgcagggtccccaagggggcggccccggccccaccaggccccggccccaccaggcccgggctcaggcaccagggagtaggtggcctccggcggcaggaaggcgagcttggcagcgatgcggccggggcagggcgggtagcagaaaaggcagcagagctcactcagc

SEQ ID NO: 920 - DNA, 437 bp, Homo sapiens
gcagagtgttttcctaaaaacagctgaaaagagctacagtgtgtctagtagaatctcagtctacaatcttaataactctagttctatgacctcaagaattggcttcacctcgaaatactttctcacctgaaaaaaggaataacaccatcttttcctccctcaatgtggctgctcaaataaaatgaaataatatatgtagcacagtacctgccacgaagggttcaataaattattagtttactttcttcagtcaacacaaaagacacattcacaagattcagatttaaggaaatctatttccacaagtcctcaccagcacaaaatgctatcgctagtttgctctaataaaaactaccatcagccgggcgcggtggctcacgcctgtaatcccagcactttgggaggccgaggcgggcggatcacgagatcaatacatc

SEQ ID NO: 921 - DNA, 92 bp, Homo sapiens
gcccgggggtccacatgcagcccctggggggccggcgcggggtgaggtccggggaccgccttattgctgaggtctggccggttggggccgcc

SEQ ID NO: 922 - DNA, 409 bp, Homo sapiens
gtgaacaaaggtctttgcatcatagacaaggtaaaggattaagtgctgtgcttttagatatgcatacacataaacatcttaatgctttacaaagcggtattgctgcccgcaggtcccacctccagccctaaggcggtttttccctatctcagtagatggaacgtacaatcgggttttataccgagacattccattgcccagggacgggcaggagacagatgccttcctcttgtctcaactgcaaagaggcatgccttcctcttatactaatcctcctcagcacagaccctttacgggtgtcgggctgggggatggtcaggtctttcccttcccacaaggccatatttcagactgtcacatggggagaaaccttggacaatacctggctttcctaggcagaggtccctgc

SEQ ID NO: 923 - DNA, 231 bp, Homo sapiens
gactaagttaaactttcctggggtcacaaggtttacaagtggctgaataggatttctacagactggttccttcacccggctgcccgccgaagtaagcgggccttactgccctaattctcaataggaccccaaagaggacgcttctttgctcctgaagggatggcaccctctggattcgcggtaacagcaaatggggctctcactcctaccatctcagtgacagtttaaagc

SEQ ID NO: 924 - DNA, 263 bp, Homo sapiens
gggcaagttgatgtttctgtcttcagccttgatactcccagtcaagttcccagaccagtggctcagcatccccaggagctggttggaaatacagaattgttggcaaccccaaacctagacctactgaatctctgccgtatggcatgcgtttgcctctgcaacccactttcctgctgtccttgtctaatcactgaagagagaaactgtaagagagggattgaggctaaatgtccctgaagttcgtcctcgatgaatagatgtgc

SEQ ID NO: 925 - DNA, 268 bp, Homo sapiens
gtgcctacaagccccgagcagtcgggcccctgcctgcctgaactgtctctcccctctcaccagcaatgcctttttcctaaaataggcccactccccgtcctgccttaggacctgccctcactgtccccttgcccaacccacttcctgcagagcttgatacagctggctccagggtgccggagcccattgttaaatattcaggaattttgcaatccggctgacagctgacatcactttggtggcttgaaattaggagtatttacaccac

SEQ ID NO: 926 - DNA, 317 bp, Homo sapiens
ggaacaggaatgaacaatagctgttagcgctgtgctaagggatttgagtgaagcttcccccgctggaggaaattctgctgtccccatttgcagatggacaaaatgaggtccagagagggtcagggccttgtccaaggtcaccgatgtaggaagcagcagagccaggactggaacttcgcccctactgcggggctctggctctcatcataccacccctgcccgcccggtcctttctttcttctccttttcatcacagcccttggccccgggcccgcttggctgcctcctgcaattagcccctatcactgttccggatc

SEQ ID NO: 927 - DNA, 136 bp, Homo sapiens
gatcctgactcctctctgcgtctcctgggggtggggagggggtttgaaccgaaggcagctccgcaaggtctccaactccagcagggatcctcagaggttcttcttccgacctcccaccccacccgcccgcagcaac

SEQ ID NO: 928 - DNA, 1463 bp, Homo sapiens
gtaagaattcctgcttcctttgggcaggcattatactggccccaggacatagccttatatagtttgcagtcctgggggatgtgtgggggaaatggggaagacctgtggggatgctgtccaaataatgattctttgtctgcagcttcagtgggaagaacagttgctgatacggaaggaggggaggcagacctctgaagcattgagtgcaaaggaacaggatgctcacatttaggcagtgggtggttgtctagcagtgggcagggagggcctgaggcagaccagagtcctggcagggtttctgtggtcctctgcctccctgcacctccccatcagagcaaggcccccctctttgggaacagtcacttttggctgctctgtggcctctagagccagcccctgagaataccccacagccctccctctgaaccctggcatgggctgcagggccagctctgctgctggtttcctgtatgaccttgggcaagtcatgcctcctctcttggtcatctctgttctgagccctggcttgctgtttagacatgtgtttccagatgggtgagctgagtccccaggaaggtcagggtttgatgaactccttggaaagggttctctagtatcttcccttctgctgcctctggagggccctgcatcaatactgggagagggacagggcaaggaaatagctcccggtgagatcccttcccccagtctcagtttcttcctctttacagtgggggtaacagtggacctgggggctgcaggctgtggagggggagtcaggaatgtgggtgggtgggtggctgtccttgtggccaagagattaggattgtgctggtttttttccagtgacacccagcaactctctgtcctctcaagaatgttctccagggagaacaagacttgactgattcttcagaagagtgctgcacccattttacaagcggacaagccaagtccttagaaggcatgggactagtccaaggatgggtggcaggtgatctgaagcctctaggctcctagccccaggtggcctgttccctcaatggagccactccagctctggcaagggcaggtgtggtggcgctgctggtgcctgctgtgggagtacagtgggcctttgtgccaggcgggcaccaccccctggctggcccctccccattcgcaggacagctcttacctgccgggccgccgccccagccaacagctcagccgggtgctccttcctgggctccacgcccggagctgcttcctgacggtgcagccgcaaggcatcgcaggggccccgcgctactgccctgctccctcaaagtcccaggtcccctcccctggtgctgatcattaaccaggaggccgtataaggagctagcggccctggcgagagggaaggacgcaacgctgccaccatggacagtagcacctggagccccaagaccaccgcggtcacccggcctgttgagacccac

SEQ ID NO: 929 - DNA, 1050 bp, Homo sapiens
gccccccactacatgcggtgtagccaacgatggcgcccccatctccccctcgcctcgggcagtgtagctcccgatagtgcatccaacccattccctctgcccctctcctcccaccgagtcaaccaccgccggcagtccaaccccaaatagcgcacccaatccactccctgccaggcagtgaagccccccgatagcacccaacccgcacccccacccccgccactggcagtccgccccgataacgccccaacacgctcctggctgtaggcagtgtagcccatagatagagcccccaaccagcccccagccaagggcagtgacgcctcggatatcacagccaacaagttccctgccatgcgcactgatgtcccagatagcgcccccaacccgtaccccagcgcgaccagtgcagccacggatagcgcccccagcaagccaccccgcggctgcgggaaatgacgtccggtaaagcacccaaccttcccgtgctgtaggcagtgcagcacccaatactgcccctaacacgcctcccaccaccgggttgtagcccacgatggcgccctcaatccgcccccgctcccacctcgggcagtgcagctccagatcgtgcatccaacctgtccccctccccgccccctgccgcaggcagtgagccctggatagctcatccaccccgccacctttctacattctggctgcggtctagtctccctcaccgccaccaacggcagcgagccgagccatgctgctgcaggctttcaagcctccagcgtgggacaggtgactcctcctctaacctgggcatggagcagatgggctggcagacgcagaagtgcctggaatggcaagaacccctccccccacagaccgaggttatgcaagtaaggtttctggactacatgttcagattggatgagagaaaaacctctaggtctactctgattgtgctttattttcacgttctgactggatgacagcaagtcttaggataaccaatcagaacaagataacaaagcccgatcagagtaggcctagaggtttctctcatcc

SEQ ID NO: 930 - DNA, 221 bp, Homo sapiens
ggttggctgtgttggagtggagagagtccttgttctccttctggatacagttgtgaacctggaggaagctgttatccctgtcggagttgtaggtggcggtgggcgtggtggcggccttcagggggtccctgctgagcgtgtacatggagatctccgtggacggcagggtgttgaagcccttgatgcccacgggggaggcgtccctggagtgtgagggctcc

SEQ ID NO: 931 - DNA, 298 bp, Homo sapiens
gtgctccagctcagccacacgaccctgcaggacgtccaactccttttccacttcctgcctctgccggcggctgctgtggctgagggccacacgctccttctccagtgccagcacctgggccagcagctgcccctccagctggtccatcttggagtgtaggccggtgggcacagcagagactggggctggggcagctgagaggttcacacgggctggaagctcctgctgttcacagggcagagaaacagaaatcaactgaggggaggaaggacaggctgggaacactcagatgcctacc

SEQ ID NO: 932 - DNA, 31 bp, Homo sapiens
gccgccccccgcccgccgccccccgcgcccc

SEQ ID NO: 933 - DNA, 151 bp, Homo sapiens
ggtttcacccgggacccctgctagccccagctcgggcccctggccctgggtcagcccctgcctcagcttgtcactcgcctgccatcggcttcatttcactcgtagccccatggcccacccctctgggtgccagccccggggctgggctccc

SEQ ID NO: 934 - DNA, 159 bp, Homo sapiens
ggcattggaggtgggcagggacaggcaggaccagtgcaggacaccccgcagagtgtcgggctgagctagtatgcggcacccagggaggccttgtgaccttcgacccagcaattccacctttaggagggtattccgcggaatgactatttactacggcgc

SEQ ID NO: 935 - DNA, 1237 bp, Homo sapiens
gtaaagccctcagtacagtgtatgacacacagcaagtgtccaccaaagggtagttattattaaccataatcctggttctcttgtgagctgcctcctgtgtgtctagcattggccagcacacatgagggggtccagtgtttgctgcttaactaagtagcttctcaggaagtgtggtcataaaaaatgataggtgatttagaaggtgagacagacacaagggatgtgttgcacagtaaatgctcccagacatgcaataaatgcttataagcatgccctctgtaatcagccctctttagagagtttccctgcctcattgctcttggtctttggcaatggctacacccactgcccaagcaagcagtatcagctgtcagctgtccccttgtcttttggatcagattcctttacagggatcttcccattgttataagcttcaagaattggagaatgcttaatgaacacttccaaattcttcatagctatgaggggccagtgcaaagggcggaaggagttcttctgtgtcacagaaattagagctggagcagatccagcttgctatccccccttcccccagcttgtgggttattgcagaattgttcacaaaaattcccattgccttggaatttgtccaagccgagggcagggatcacaacacaacctctcaagggaaaaaaggaaggcctgttgcttgagatggctcagagcacttttggtagccagccaaggcagctatcactcatgaaatctgccttcccctccagcaaaaagccaactgtatagaacaccacatatagagcgctaagaatagcacagcgctccaagaacatagtgcacttggcctgcatacaagtgtgcagggcttaacgagtctttttactctgaaagctgggtgggttggaacaaacaaacagaaaaatattttccccaagtagcatgcagagaggaaatgagagcaagcacaagagagcaccctggcatagcattctctgacctgggctgccttttcagggtatgagttgattccgcaggcaccaaggcatgcctgtaagccctacagggcagacgccctcaccccaatcattggcttaacattcacaccaggctgagtaagccccaaaagtcctgccattggctctgacaggaattgaaacccatcttctccacaataaatatttgattgacagattggcttccttcctataagtatagaaagcgagggcaggttccatccaaagcc

SEQ ID NO: 936 - DNA, 1077 bp, Homo sapiens
gagactccgtctcaataaataaataaatacacacccatgtagggagcatattgggtgagtggcctgcctattccgctccttccatctcattcccactgctccagtaaatcattttcattaatttttctctttttttttttgtttttacaaacacatatttatatacaaggatatattcatattataacccaggtgcggccccacatgtcgccatcgtgtgtaacgtgcgaatcgcgagtgattcactgcggctaccacctaacctcggccttggaggctggacatagggtggacggcagtcgctggagacggagatggcctggtgggaccactcatctatagcgcctgcctcggtggtctcctgcccgacaccgcgcacctgccttttcctccttccgtttttttacagcttttctgacacagcgggaccacgctcgcggcaccacagctctcgggaggtgacccggagataatggcccagtaggaacactcaccatagcgtctgtcttggtagtctcttgccggacaccgcgaggataccacgcgtgtcggtttggacggtctgctgcccagcaccgcaaggacacggatgccccgcccccaagagcaggaagtgacgccactgccgccagcggaagtgacgtccagggccagcccgtacaccaggacgccctgtcttctacgtaactccttatcttaggcgaatttgtcttggtcccaggacaactaggaagaattaggtgaaggatggaggagttctctaaaggaagggggttgggggaggtcaagggaagacctccatattatttttctcttcctcatacatttatttatttagagacggagtctccctctgtcgcctaggttggagtgcagtggcgcgatctcggctcactgcagcctcagcctcctgagtacctaggattacaggtgaccgccatcacggccggctgatttttgtatttttagtagagacggggtttcaccactttggccaggctggtctcgaactcctgatctcaggtcatctgcctgcctcagcctcccaaagtgctgggattacaggcatgagccacc

SEQ ID NO: 937 - DNA, 310 bp, Homo sapiens
gagatggggaccccagctggcactgggtggcatttcttcttcccttgctctacttggagcatatgttgttcgtggagccgaaaggaacgtagcaaaaagagtgttcccagccctccccggccccagccgctgggcagagggctgcatgctggctggctggccaggctggggcagcctggcctcctcggcccctacgctgcacccaccttccacttcctggagatgcacccacatctccaggaaaattgtttcagaaaatgcctacaacacagcagagagtggaacaaacagggtcccaacgcatgtctgc

SEQ ID NO: 938 - DNA, 488 bp, Homo sapiens
gaggcaagagactgagggcacgagctgttctagtgtaataaaatatataaaataataagagttatactagatatagatcatagatatgattatatgtgaatatcattaatcattggtttgtagcaattactctttattccaatattataataatccttgctctacaattataacctgggaaaaaccagaccgtacagagataggaactgaaggggcactgtgagaagtgaccagaagacaagagtgtgagccctctgtcacgcccggacagggccaccagagggctccttcatctagcggtaatgccagcgtctgggaagacgcccgttgccaagcggaccgtggtctagtggtagcatcagtgccaaggagaaacacctgctacttagcagaccgggaaagggagtctccctttccccggggtagtttagagaagactctgctccacacctcttgtggagggcctaactgatcgcccacagttatcc

SEQ ID NO: 939 - DNA, 160 bp, Homo sapiens
gtgtctcaaaaaaaaaaaaaaggtaaagcaaagcaaaacatgctcattaacactctcattaatgactgtacatttgttgtacttgagcgagttagaaaaacgccacactttgagatgaatttagagtcctttattagccggtgaccgagagacggctaac

SEQ ID NO: 940 - DNA, 625 bp, Homo sapiens
gggagccacctgggtggagtgtggacaatgtgacagcagcaagtgccaggagccacggagctcgggctttctgttcttctggggacaccacagagccatgattagcaggcccgtcctgcctttgaggcaacaaacactaagaattctaaggagcctgttcgagtatttccactttattatcctgagtactttttaaatgtttttgctttcactttctcaggaactgttttctaatgaaactcatgcctgggctggcagactcacacctcacagcctcctgcctgctcacgggaggctggaacctcatcccatggtcctgctccatctctgaacgccctgccgggtaacaccacttccccattttgcaggcgaggaatctggggagcagtcagtagagccgcccatgggaaggcttccagcgtgggagaggaggagctggattcacacagggtccggctggcctggagcccagtgcgtgccctttggttccccatctctcagcgtgagcccctctctgagccttctgcaggtgctgtgtaccagagaggggcgaccttcccaggaacgccctctatgcccgcaagcctccagcgcctcctccttgttaagggtcagcaatgggggc

SEQ ID NO: 941 - DNA, 344 bp, Homo sapiens
ggtggaggcggcaccaaattcgtctacttaattagcattcccccactgccccccgcagaccctggccttcatgagtgctcattctccactctgtcaggttgggtctaacgtctccgtttggtcttggctatgggagatgtggtcttcaatcttggggctcgttgttctcagatcctgttagttttccttccgtggcctgtgtttgcaggcacagtcaagtttaattatttatttacataatcagcacctactttttcccaacagttcattgaaacctttcaaggactttggaaacaatcccttttattctcattttggttggccggatgctgaagcagcagaac

SEQ ID NO: 942 - DNA, 280 bp, Homo sapiens
gagggaagctgggagtgtggagccgggggagactgaggcgggcagaccaagcgtcatcaggcagcccaagtccagccaccgcactcctggactggggagggagaggctgcgcaagttcccagttctccattggcacagagagaggatggagcggggctggcggcccgcgggtttaaccggcctcagaaaagagagaggatggagtggggctggcggcccgcgggtttaaccggcgtcagagccctgcagttgtgcacaaaaccacatgcattgctttttc

SEQ ID NO: 943 - DNA, 95 bp, Homo sapiens
gaggccgggaacggtggctcaggcctgtaatcccagcactttgggaggctgaggtggtggggcggggggagggaatcacctgaggtcacgagttc

SEQ ID NO: 944 - DNA, 434 bp, Homo sapiens
gccagggaggtggacagatgcaagccgtggtttcctggaggccaagtgaggaaaggtgtttgggagggaaggagaggggaacccctgggtcaaacgctgctgccatgctcaggctaaacgctggatccagcaccatggcagtcaccagggaccctgtcaggaaggagcatgtttggcagaggagtggggctgccagcctaatgggctcaagagagaacaggcaggaaacgaatggagatggcacatgcagacagcacttacaaggcgtttgctgtaaagggtgcagagaaatggagtaggagctggtgggggccatgaggtgaagggaaagtttttgtttgtcttgattgtagaaataacagcatgcttgtcattcagccggagtgatgcagtagagggggaaattgatgccagaggagagacttgctggagcc

SEQ ID NO: 945 - DNA, 161 bp, Homo sapiens
gcggaggaaatccggccgccgcgcagcgggctgaggtggaaggtgtcatcggtcatcctcgtcatcttgatattcacctgggacccttgtgggaacctctttccctagtttgccaccagctctgcctctccctcacccacctgtgacccaagcacattctc

SEQ ID NO: 946 - DNA, 562 bp, Homo sapiens
gtagccagacgtctgaatctgtgtttcaataacttccctgtgggattctggagcacagcctggtttggaaacctctggagctggcagctaaggctctcgaggcctgagtgcagtgcacggcacgtgaggtacgggtggaaagggctgctgtgcccagaagttgtccccaaggctctgatctgcagctccttccaccggagagggtggtgtgggtggccccttggggccagtggccagcacatattgttgatgtggacagctgccactgggggtgctgagtgctttcttcctttttcttctctgctgttctgttcccagaatgtagacttccccagagggattcctaggcggcctttttgcgcgggtgcctgtgtggaaaggcatagcaccgcgcccgggctcctctcagctctcagggccttcctgtggtgttggtttgtccggtgtgggtgtgcagttgccctctctgtggtctgctttcttactcagatgctaatacattttttaaacaccgacttgcctggaagtgtagctgaccctgatgtaagacgctatcgccccc

SEQ ID NO: 947 - DNA, 13 bp, Homo sapiens
gcgccgcccggcc

SEQ ID NO: 948 - DNA, 33 bp, Homo sapiens
gggcggcggggcgcggggtggggcgcggggggc

SEQ ID NO: 949 - DNA, 325 bp, Homo sapiens
gtgtggtgaactccttgaactcgctgtcatggatggtgaagtagggacggaagtcgcagcagaacctgaggggctgcaggcagctgtgggcagaggcagcagggagcaggtgaggcaggggcagcccaggcacagccgcgatggtccagcttccccagccgggaccgggccaaggcgatacctggtcaaggccagcaccatctccgaggacacgtcgggcgagggtgccaggactagcaggggctccccgaggagcatgagctcccacagtgtctgcatatgagtcagcacaggccggaagcacctggggccgggcaggaaggtc

SEQ ID NO: 950 - DNA, 258 bp, Homo sapiens
ggggtgccctttggccaaggaggtgccggttcccgggacacgtgacccgggccactgagatggtcccaggcccaagcccagaggggacgcgggcttcccctggccgtgctccaggctgtgtgtggatgggggctgtgggcttcccctggcagtgacccaggcctgtgtagaggcaaaagtgggcaggtgtgagttctccaaaaggctgagccatctggttgacattctccatctgcctctgcagggagcccccagccc

SEQ ID NO: 951 - DNA, 66 bp, Homo sapiens
gcttcccacagcagcgtcggggtctcccacagctgctgccagcgccccttgccctgaggccgcagc

SEQ ID NO: 952 - DNA, 749 bp, Homo sapiens
gagacaatgatgtctattttctatttaatggtatgtgaaatcagctggctgtcttgatctagtagccgagacacaggtgctcatattacaaaataaatagtggcaaaaattgaatggacatttacggtagcaggcactgggaagagagaaagaaaggtgaagacactgtaaattgaatgacttcaccttagcagaggtctctgttgtctggcatcatgagttcatggaataagtctgctcttgcttgctagaaggttgtctctatctttcttaatgaatgacttgatagatttcttaatgaatgacttgatagttgtacaaaacgtgcaaaaatttgtcctcgtctcaaaaacaaaaagaatggcaagatagagatggaggatgagatagcatcttttggaaactatcagcacctaattagtcctgaacaaaggtagttgtgaggtccaaaccctcttgtgccctgtttttctacaccctcatggtaattggtatgactttcacaaattacagaaaaagacacccatttgacaagggaactgaaggtggtgaagacatactggcaggctacagcatttcaacccaggggttaattctgaaactctctcaccatcaatgtaaaatttttcatctatgaattcccacgtacaaagaaaaggaaagggaaaggaaacagccttcttagccagggcaatttattagcattgctcaggtccgtgcaagaatgtaaactaggacttttgtgaaac

SEQ ID NO: 953 - DNA, 223 bp, Homo sapiens
gggggggaggcacccccgcgaggcggggactgagaggcagccgctgttcccccacactggctcttgggacccccatcgcaggggggatggcaccctccgtgagcggggactgagagccagccaattttccccctggcttttaggacccccatcggagggggggagccaccccccatgaggcggggactaagagccagcccctcttcccgccccttgctcttcc

SEQ ID NO: 954 - DNA, 58 bp, Homo sapiens
ggggccggggccggggcggggcggggggggcggggggggcgggggggcgcggcctggc

SEQ ID NO: 955 - DNA, 212 bp, Homo sapiens
gtgctctgtctccttggccaggaaaggtgaagctgtgtgacctagaacacacactcctgacctctctgagccactcctagtagcaggctgtgagctgcttgtctcactacgtagctaggaaataacagcatgaaagtgcctcagaaaggaactaccagtggctgtacagttactacacatcgttagtaataacggcactcccctcccaagac

SEQ ID NO: 956 - DNA, 70 bp, Homo sapiens
gtgcactgatgcattgccgaaggctgcggcctctctgggcgagccccataccgaaacacagaggtgcggc

SEQ ID NO: 957 - DNA, 231 bp, Homo sapiens
gttatatataggattcgtgttcgccgtggtggccgaaaacgcccagttcctaagggtgcaacttacggcaagcctgtccatcatggtgttaaccagctaaagtttgctcgaagccttcagtccgttgcagaggtaaatggttttgagtagcagttatattgaatactgcctggggatggtgggagagagagattaagcaacttttctgattgtacttaggtgagctgtctc

SEQ ID NO: 958 - DNA, 297 bp, Homo sapiens
gtgagcatgcccgattatcatcgcagagctgctgagatgatctatagctgaccacagacgtgcaagcaggcccagctgagatcccctgattcccactgtgagctacacatgttaattatcacttgtcactgaagtttgatagttatgcaacattactgggacaagagataattgatacattctcttacgtctaattttactacaaggagcctgagagttttgccattagaattctgttacttgttagtttttggtggatagtctttatcatgtttaagtgaaacagaaggatacacc

SEQ ID NO: 959 - DNA, 244 bp, Homo sapiens
ggcgctcatcggggacgctccgccgcacaggagcccacggagggggtaggaggctcaggcatggcgggctgcaggtcccgagccctgcccggcgggaaggcagctaaggcccggcgagaagtcgagcgcagcgccggtgggctggtactgctgggggacccagtacaccgtccgcagccgctggcccgggtgctaagccccttattgtccggggccggcagggccggctggcggctccgagtgc

SEQ ID NO: 960 - DNA, 393 bp, Homo sapiens
gccaacaactagttagtgagaatacctgaataacaataatgataacctttcaaagaagcagcaactattattttacagaaatagaactaagtggcacctgagttataaagacagtttggaggaattctgctgcatacgatctttaaacaactaaggtccccgttctcaatctgcagctctgaaccaaagaacattaagggcatcacctactctgagatgacggtggcctcttttaacccctgtttatagaatagctggctgcaggtgaaaggactgagatgatgctgtccttgtcccccagaaagaagcaaaatcatcttttttacagggcaggtacttccaatctaactagggaaacatgcggcagttcgccaagcagtaaaatctcaatac

SEQ ID NO: 961 - DNA, 245 bp, Homo sapiens
gtcagccacggtcccctccgaggtctgagcgtcagccacgtccccgcccagaggtccgaccaccgccagccaagcagcgtccccctcagaagtccaagcaacagccgcgcagcagccccctcagagggccaggcgccagccgtggggggtcccccgtcaaagcttctaggttctggtaacaccatctcttcccttttgttccccagccctaaggttagtagttgcttcctgtgtttactaacacc

SEQ ID NO: 962 - DNA, 339 bp, Homo sapiens
gtgcccttttcctcacgggaattaggagggaagcaccaagatgtggggtcctccacgagtcctagagagaaatccagagagtgtatgggttcaccagtcagtgtgatgacgcacttccggggccgccttcgtttttgtcgcgcgaggttttggtttgtgaggatcggcgagtggcgcccaccatctctgcttgctgaaaagctgcagaggccgccaggagcccacggtgagcgggtctgaggaggacgggaaacagccccgagggaggcgggtgtggctactgctggtactggggtcctcatgccgatccccgagcttggctctgtagcgtcgagatgc

SEQ ID NO: 963 - DNA, 23 bp, Homo sapiens
gtcgttgaggagatgcgactcgc

SEQ ID NO: 964 - DNA, 318 bp, Homo sapiens
ggagctgtttcctccaaattcctccctctctgtgatctccctggtcctttcctgatcgctgggctccctttttcgggcctctggccaaaaacttggtgttgtagttaccctgctctgccgtgcacttcctacaactgcacccacagtcgcggccaagcagcgaagatttaagaaagtaagaaagcgtgacggtttgctccactcttttgggctatagctcctccaatcagaaaaggaaggttctctgcatgtcccactttatgtgaaatctaacaaagttgaactcgtagaagtagagtgtagaaagagattggggcc

SEQ ID NO: 965 - DNA, 76 bp, Homo sapiens
gtggatcaatctcgaaggcggcggcagctgcagcgcgcgcagctggcggccccacgaagcggtagcgcaggttggc

SEQ ID NO: 966 - DNA, 25 bp, Homo sapiens
gcatcgcatcgcatcgcatcgcatc

SEQ ID NO: 967 - DNA, 66 bp, Homo sapiens
ggccgggtctcgcgcagctacctctccgacctggagcgcctggtaaccccgggctacgtgcccacc

SEQ ID NO: 968 - DNA, 287 bp, Homo sapiens
gggtgggtgtgggcagctggacccagcagaggggcgagaaaggatgggggaggggctctgttcaagagcagacaggggcaggccccggaagggtcaaggcctggtagggagcaaggggctcggaacacccgagctctgcctctgtgggccttcttaccactcacacggaggcattttttgtcatcaaagccctgctgcctctcccagatggcctgtctggatcaaccctgttccactgggcacctataatcagtctgtggccttcccttcagcttggcagttcagcc

SEQ ID NO: 969 - DNA, 1174 bp, Homo sapiens
gatagaactttatgtaagaatgtatgtaatttccctggaagattcagtgcacgctccggtctgcctcctaccaatgagaaatactggagtttctttctcctcatgatctaatagtggcatccaatagacagctacattatttccacacacattacttcctttgaaaagttcttggtcccatttatcctccttcctgtgattcacaggctccaaattgcccccaaactaggtttgaatccttagaggctgcttgctatctgcaaaccagatgggttaacaacctctctggtcatcagtttctttaggtgaacaaggaaataataataggtccgaccttccagggctgttgtgggtatgaaattagtcaacaagtgtgcacaaagggcttagtacaatgactgcaataaaagggcttaacatttaagatccatgccataaacagctgtgtgtttgctacattccaagtgctcaatacatattaactataataatagtgtgtattattatgtcctcacaagcttaaagcagtctcgctgaatctttaaccaaggccatggcagttagccagggaactgaaaagtgacctttcattcttttcttttctctttcctagcctgtcccttctggtctatgagtctcccacctaggaatcattgcttccgttttctatctgtccagctacactccttcaagctgttactgatgaagttgagagctgcgagaggctgttaggggaagggagacttcacccttctgctttgaattcagacaggattggcccacaagactcccactggttgatgatgaaaagtaggctaaactgcctgggatgagggcatttgcacggatatgaaagcgttattatttgtgacccaacgcagccaagtgagctaacaaggagaggacaaaactgcctttcagccgcttttcaaggaatgttgacatcatgattacttctactagagttcaaagtctagtaaataaagtgagtaaataaagaacatggaaaggcaaaaagtgttcatagtgaaattttaagaacaccttatattccctcattctcttatattctctgctgccctgatatttttcattatgtatgccaaataacagtaaaatgttggagcttcaaatcttgactaatagtttgcacctttgacaaataaatctggtc

SEQ ID NO: 970 - DNA, 120 bp, Homo sapiens
gccccaaggcccgccgccgctccagcgccgcgcagccaccgccgcctctccttagccgccgccgtgacgaccgcgtccacctcgcaggtgcgccagagctaccaccaggactcagaggcc

SEQ ID NO: 971 - DNA, 718 bp, Homo sapiens
ggccggggctccccgcgatggccctcccgacaccttcggacagcaccctccccgcggaagcccgaggacgaggacggcgaaggagactcgtttggaccccgagccaaagcgaggtcctgcgagcctgctttgagcggaacccgtacccgggcatcgccaccagagaacggctggcccaggccatcggcattccggagcccagggtccagatttggtttcagaatgagaggtcacgccagctgaggcagcaccggcgggaatctcggccctggcccgggagacgcggcctgcaagaaggcaggcgaaagcggaccgccgtcaccggatcccagaccgccctgctcctccgagcctttgagaaggatcgctttccaggcatcgccgccagggaagagctggccagagagacgggcctcccggagtccaggattcagatctggtttcagaatcgaagggccaggcacccgggacagggtggcagggcgcccgcgcacgcaggcggcctgtgcaacgcggcccccagcgggtgtcaccctgctccctcgtgggtcgcctgcgcccacaccggggcgtggggaacggggcttcccgcatcccacgtgccctgcgcgcctggggctctcccacagggggctttcgggagccagggagcgagggccgtccccgtgctccagcccagccaggccgcgccggcagaggggatctcccaacctgcccc

SEQ ID NO: 972 - DNA, 243 bp, Homo sapiens
gctagccagaacgcagggggggccccctgccccgccgcgcacgccgcggagaccccgcgcggctgaggcgtcgccagagccggcctcgaccccgagctgggagccccgcgggccgcgcccgccgccggctccacccacccgggtccgggaggccgaggccatggccgcgacagaggagcggagcctgcacaacttctttgccaatcgggacaagaagaagaaggagcagagcaaccgggcggc

SEQ ID NO: 973 - DNA, 273 bp, Homo sapiens
gttcatcattgtcacagcttattatccctgtgaaagtagtcccctactccacagtttaaagaaattcttggcggggcgcggtggctcacgcctgtaatcccagcactttggaaggtcgagggggggcggatcacgagttgaggagatggagcccatcctggctaacacggtgaaacctcgtctctactaaaaatacaaaaaatcagccgggcgtggcggcgggcgcctgtagtcccagctactcggcaggctgaggcaggagaatggcgtgac

SEQ ID NO: 974 - DNA, 141 bp, Homo sapiens
gcgcaccaccacgcccggctaatttttttttaatgtattttttatagacagggttcttaccatgttgcctaggctggtcttgaactcttggacttaggcgatccgcctacctcggcctcccaaagtgctgggattacaggc

SEQ ID NO: 975 - DNA, 120 bp, Homo sapiens
ggatgacctgaaggagatgtttcagcttggcacagtaacgatgacgatgtgtatagggcgcccccagttgaccgttccatccttcccactgctccacgggctgctagggaacccattatc

SEQ ID NO: 976 - DNA, 730 bp, Homo sapiens
gcctcctcctcacatctaaagcatttgtcttaatttactttatgtaattaagaaaaatccactactgttgtggcaggagtgggggaagcaagttacacaacagtatagcctccgttatactaatttgttttaaatgatttctagaaagaaatagcaaaatgtgatagaattaagggggattttatcctttctcctttatacttttttaactttccagattgttcaagtggtgtctatggctttatgatcacagaaacagggctatgaatgtgagcaagtttttttcttcccctagagacacttaagatgtaagttctgggagctcctggaaggctacaaacctgcctggggttcagaaagtctgaggaagggcttagatgggctcggtctgcaggcagcacaggttaggcagtgatccacggggttatcataaaccgcagacttagagaggcacagagaccatccccagctctcatcaaaaggtcagctgaccaaggccagagggcacaaagcttgcctaaggccagtcagccgatgagtggtgacaaagctggagtctgaatccaggccctcggtccccaggcagacagtgttactccccttctctgtatctttctttctctctgcatgtctctctttctccaactttctgtctctttctcagtctctgcctctctgtctccctctccctctctctctctccctccaccaccacctccctctcttgcac

SEQ ID NO: 977 - DNA, 97 bp, Homo sapiens
gggatggtctcgatctcctgacctcgtgatccgcccgcctcggcctcccaaagtgctgggattacaggcgtgagccaccgcgcccggccgagtgccc

SEQ ID NO: 978 - DNA, 102 bp, Homo sapiens
gcccccgtcttcccgccccccccgcccccgtcttccccccgcccaccccgccccccccgccccccttcgcccccccatgttccgtttttgtcctatcagagc

SEQ ID NO: 979 - DNA, 354 bp, Homo sapiens
ggcgcttgcgggccagctggagttctgggtgggcctgggcttggcgggccccgcactcggagcggccggccggccggccctgccagccctgggcaatgaggggcttagcaccccggccagcggctgcggagggtgtgctgggtcccccagcagtgccggcccacgggcgctgcactcgatttctcgccgggccttagctgcctccccgcagggcagggctcgggacctgcagcccgccatgcctgagcctccccctcctccgtgggctgctgtgcggccccagcctccccgacgagcgccgccccctgctccaaggcgcccagtcccatcgaccacgcaagggctgaggagtgc

SEQ ID NO: 980 - DNA, 68 bp, Homo sapiens
gtgggcaggtcgagtgcctctggcactccgttggctgctgcccacaaagctcccggccatggcctccc

SEQ ID NO: 981 - DNA, 170 bp, Homo sapiens
ggacggcacctggaaaatcgggtcactcccacccgaatactgcgcttttccgatgggcttaaaggtgcaccacgagattatatcccgcacctggctcggagggtcctacgcccaccgagtctcgctgattgctagcacagcagtctgagatcaaactgcaaggcggcagc

SEQ ID NO: 982 - DNA, 168 bp, Homo sapiens
gatgccaagcactggcatgacatggagctccagaacctgggcgctgtggtcggccggctggaggcggagctcagggaaatccgagcggaggcggagcagcagcaacaggagcgcgcgcatctgctggcccgcaagtgccagctgcagaaggacgtggcgtcctaccac

SEQ ID NO: 983 - DNA, 168 bp, Homo sapiens
gaaccacttttcctccccgacctgccggctgcagggtctccccgcccaaccctgccaggctcagacgaagcttctgctgagccgcctggacgcagcgcccctgggtggcggcaggtatagcagggcgggaagcagggaggcggccccaacgccgcggaggccaccagc

SEQ ID NO: 984 - DNA, 77 bp, Homo sapiens
gttcgtcgacggagctcaggaggacctctgggatcaggatgagggtgtgtccaccgagagacactcgcaggatcgac

SEQ ID NO: 985 - DNA, 144 bp, Homo sapiens
gcggggttcggggcccgcgggctcctccaatcggaggcgcttggcagggccgggtcctcctggctgctgtccccaccagggagcagggaaggcgctggggctgcggggccggctgaccatcgcctcgacggcgctgtggacggc

SEQ ID NO: 986 - DNA, 42 bp, Homo sapiens
gccgggtcttccgggctgggcgccgctcgggattcggggccc

SEQ ID NO: 987 - DNA, 105 bp, Homo sapiens
gcgcgacgcggggcgagtcctcggagctctgggggcgcctcccggagatcggagtcggtgctgctgctgggggaacctcgcacgctgtgtggctcagcctcgcgc

SEQ ID NO: 988 - DNA, 691 bp, Homo sapiens
gggaaatattcaaatattatttatcttaatataaaatacctatattcaaatcttatttattttaacataaaatatcttgctatgctaatcatcttggtatcataaaatgcaatatttattttaaaatataatatgagaatatataaaattattttttaaaggtggtcattgttgctacatataccaaagcagagcttgagaccagcactggcttgtggttgtagtctccgtcctgtaggagacgttcaggatatggcaccatagcagcgcattgaagccctggctgtgagttcactgactaaaaagcctgacatggcattaatttattaccaatctgggggcttttcttccccttactctttttttttcaggcatgtctttaaccgaacatttaatttgtttagttgctgtgattatgctttggtcacatttggcaatgggaacgatctggaaagcttagagggaatacattatggtgccataaatttgagatggaactatgtttttgtatttctgccaggaatatcagacagcaagttactgtttgaaaatctgctttttcagtcttctctgctaatacaggggtgggtggtcccaaggtcatctcattccatcctcaaaaagacaaacactattcctgatgtgtcctgcttctgtctttcctcacgaccaaaaggaagagataggattc

SEQ ID NO: 989 - DNA, 16 bp, Homo sapiens
gcgcgcgcgcacgcgc

SEQ ID NO: 990 - DNA, 148 bp, Homo sapiens
gcgtcaactggctctgctgcgcgaagtggagatgaactggtacctaaagctctgcgacctgtccagcgagcacaccaccgtctgcaccacaggcatgccgcacaggtaagctgcccctgctctgcgcgggctttgggagacgccgttc

SEQ ID NO: 991 - DNA, 688 bp, Homo sapiens
gcccacactcgcacacactcacccacatgtgtgtgataggatcgcaggcgtgagaacccagtgtggggctttgttgttgattgccttgagggtgtgagccagggagcctgttctagttgccagatctgtgtctgggtctctgtgtcgtagtccaggagaggcgacactggtacacacacactcatacacttacggggctatgtgtcacctgtgtgtgtcgggccacaaggcccttgttgtgggtgtggtgggtgctggtgctgagtgtggagtgggagtgtggtttgggtcaggtgcacaggggctacctgaggaggctcacttctccctccccccttcccttcctttctgtctttcaaccctcatcacctactggaccctcaggagtccaggccctagcaggagcccaagcttccaagcctccaggccaagcagctggggggctgtccagaaggccgagtcctgatgtgctggggcggcccgggaagagggggcagcaggacctttcgttccccattcccggcctgcccacctcccctccactgtgaagtgggagctagggctactccctggctgtgaggccaggccagcatgggatgcctctgggaagcagcggtgcctacaagggtggtttcaccaattccttcacttttgcaatacctcagactctctggtctccagttcgtgc

SEQ ID NO: 992 - DNA, 506 bp, Homo sapiens
gccctgtgaggtgtcagtgtgcccctactcgggggtgcctcccagttaggctgctcgggggtcaggggtcaggggtcagggacccacttgaggcagtctgcccgttctcagatctccagctgcgtgctgggagaaccactgctctcttcaaagctgtcagggacatttaagtctgcagaggttactgctgtctttttgtttgtctgtgccccgcccccagaggtggagcctacagaggcaggcaggcctccttgagctgtggtgggctccacccagttcgagcttctgggctgctttgtttacctaatcaagccccggcaatggcgggcgcccctcccccagcctcgctgccgccttgcagtttgatctcagaccgctgtgctagcaatcagcgagactccgtggggtaggaccctccgagccaggtgccggatataatctcctggtgtgggtgcgccgtttttgaagcccgtcggaaaagcgcaatattcgggtgggagtgaccc

SEQ ID NO: 993 - DNA, 285 bp, Homo sapiens
ggtctgaaaagcgcaatattcgggtgggagtgacccgattttccaggtgcgtctgtcacccctttctttgactcggaaagggaactccctgcccccttgcgcttcccaggtgaggcaatgcctcgccctgcttcggctcgcgcacggtgcgcgcacccactgacctgcgcccactgtctggcactccctagtgagatgaacccggtacctcagatggaaatgcagaaatcaccggtcttctgcattgctcacgctgggagctgtagaccggagctgttcctattc

SEQ ID NO: 994 - DNA, 97 bp, Homo sapiens
gtccctgacctcaagaagttgccagcctcccgagggagatggctgtcgcacggactcccgcacccaccagaaggcctgcagggagacctctggggcc

SEQ ID NO: 995 - DNA, 79 bp, Homo sapiens
ggccgtgcgcagtggctctgtctgtaatctccgcacttggggaggccgaggaggtaggatcgcttgaggccacaagttc

SEQ ID NO: 996 - DNA, 214 bp, Homo sapiens
gagggcagcaccgagggaaggagcaggaacccaggcagaggcgcccaggcacacgcagaggagccgcgcaggaggccagaggctgagccctgaggggcggggacaggccgcttccctgcgtgcagtttcacaagctcaagctgctgtgtgcggtccggaaagagtagtatgaggcctgaccactggctttggccgcctggtgagagcagcatcc

SEQ ID NO: 997 - DNA, 233 bp, Homo sapiens
gcggcccctgtaggaaacagccccaggcacgcgtgcacaggcgccgagaccgagggagagcgcggccccgtaggagacagccccaggcacgcgtgcacaggcgccgagaccgagggagagcacggcccctgtaggagacagccccaggcacgcgtgcacaggcgccgagaccgagggagagcgcggcccctgtaggagacagccccaggcacgcgtgcacgggcgccgagacc

SEQ ID NO: 998 - DNA, 219 bp, Homo sapiens
agccctccccgagcccttccccagccatccccgagcccttccccagccctccccgagcccttcccgagcccttcccgagccattcccgagtccttccagagcccttcccgagcctttccccagccctccccgagcccttcccgagcctttccccagcccttcccgagcccttcccgagcctttccccagccctccccgagcccttcccgagccttcccg

SEQ ID NO: 999 - DNA, 166 bp, Homo sapiens
gtcgctttgctgagttgctcaacgctttcacactcggcgggcggcactaaacagacgctttcctggggcaacaaacccagccgggcgcgggcaccgctcaggctcccttggtctagcgccctccagtgttgccggccagcactgctgcagaggccgcgggtcgctc

SEQ ID NO: 1000 - DNA, 481 bp, Homo sapiens
ggaggggacagtcagctcccggaggggagagtcagctcccagaagggatagtcagctcatagaggggacagtcagctcccggaggggaaagtcagctcccggaggggacagtcagctcccggacgggacagtcagctcccagaggggatagtcagctcatagaggggacagtcagctcccggaggggaaagtcagctcccggaggggaaagtcagctcccagaggggatagtcagctcatagaggggacagtcagctcccagcagaggggacagtcagctcccggcagaggggacagtcagctcccagaggggaaagtcagctcccggaggggacagtcaactcacagaggggacagccagctcccagcagaggggatagtcagctcctggcagaggggacagtcagctcccggaggggacagtcagctgccggaggggacagtcagctccaggcagaggggacagtcagctcccagaggc

SEQ ID NO: 1001 - DNA, 484 bp, Homo sapiens
ggaggggacagtcaactcacagaggggacagccagctcccagcagaggggacagtcagctcctggcagaggggacagtcagctcccagagggaacagtcagctcctggaggggacagtcagctcccggcagaggggacagtcagctcccggaggggatagtcagctcccggaagggacagtcaactcacagagaggacagccagctcccagcagaggggacagtcagctcctggcagaggggacagtcagctcccggaggggacagtcagctgccagaggggacagtcagctcccggaggggaaagtcagctcccggaagggatagtcagctcccggaggggaaagtcagctcccggaggggacagtcaactcacagaggggacagccagctcccagcagaggggacagtcagctcctggcagaggggacagtcagctcctggaggggacagtcagctcccggcagaggggacagtcagctccc

SEQ ID NO: 1002 - DNA, 155 bp, Homo sapiens
gggtgccttcccaggcactggtgctaccgctagaccaagctaggtaacgggtgccttcccaagtgctggtgttaccgctagaccagggagccctccagtggccctgtccgggcgtgacagagggctcacacacctcttccggtcactttctcacc

SEQ ID NO: 1003 - DNA, 193 bp, Homo sapiens
ggtccttcccttctatctaacagattcctcgaagtccctgccaccagcggcagctcttcctccatcctccctcacacccctccctgcggacttcccccacccctccacccacagcgccagtctgggtcaccccgcacccccttgttgccaaatccagtggggcagcctcagctcctctgacccagctgacccc

SEQ ID NO: 1004 - DNA, 363 bp, Homo sapiens
ggtccagggacgtaggaactggcctgcccctgttctgctgatgaagccacaggtgctcaaagaggcgatgtgaccggcctagagggccaaaacccagagctgcgcctgggagcaccccctcctcccctttctctagcatcagaagcagcccagatccaacaagatcagggccaatggaggcaggacttcacccaaggcagggaccaagatggattggttctgcagtgtcccgggactccgtgggctacagaaggctccaccttgaggacaggcttgctgagtgaacgcctgctggtgacagcctcaagaagaaagtacattaagccaccttcttcccaggaaagagagaaaagcgtcaagtcc

SEQ ID NO: 1005 - DNA, 496 bp, Homo sapiens
gggtccctcccaggcaccccccattttggtgcccaacactcttcctttcccccgctcctgcatctgcctctgctcctatctctccccgtggggtgaccctccttccgctaaggccggcagcatccttggtccagcctcctggggggagctcagtgctgactccaggggcaggggctgcaggggaaggggtggggagtgcagagctgaggcctccacaggggcttcagtgcagggcctgccccaggtcaggggagcagccctcggtgctggccaagatcggggggcccagctgtccctgcggggcaggcctggcccacccagagaggccccaccccacgttagctctcaggtctgctcctttccttggagtccctgagttctgaatccagcccccctcccccgtgcttggcaaggggggctccaaggagagggaggaggggtggacaggaggagcacgtgatgccgtcacggtgggggctggacatttgtcacgacc

SEQ ID NO: 1006 - DNA, 165 bp, Homo sapiens
gggatacgggtaaggctgggtgggggtgtctggggggcacacagagaataaccagcacacagccaaacccgtgctctctaacccgtcaacagaaacttaacaataagtgttcataacctatacgaaggcaatcataaaacactcctgaagacacaaaaaaaaccc

SEQ ID NO: 1007 - DNA, 407 bp, Homo sapiens
gctcggggaagaatgtcagcaaaccttcctcctcttcccgtcctgaccctgccagtcacaccctccagggctatggccgggactgcagccggcagatgttcaccactcgatcttggttgccgcctggagagactttcttttcagctggataaacagagacagaaacctggcttctcaccctgcctgctgcagggacacgtgtcaccttgctctgagtcctggtgtcttcatccatgaagggggcactgacacccaccccgagggtaagatgagccccgagtgcctccaaacccagcccaggaaccacccgccaaggggacttctcaacgcccagagcagggccctcccctctgccgacctgtccaccacggcccctgacttcctgagtggctctcctctccacggac

SEQ ID NO: 1008 - DNA, 640 bp, Homo sapiens
gaggccctatctgtacaaaatataacaaaacttagctgggcaaggccatgtgtgtctatagttccagctattcaggaggctgaagtgggaggattgcttgagcccaggaggaagaggctgtagtgagctgtgattgtgccactgcactccagcctgggagatagagcaacattgtctcaaaaaaaaaaaaaaaaatgtggcagccccttgaggaagaaagagctcctatcttgacaatttcagccaatgcctgtgagtaccagcaggagcctctatccctctttgccccaccctgcatccacgcattcattatttcattcataccccctcattttctcaacacccacttcgtgccaggccctgaggtggctctaggaccgagagacagggatcacagagctccccagtggagtggagggtacagacatgttgacaagaacactggagcccagtgcgggctgggggcatgtggtcagacctgcaaagccgggaggagaagggggtcggagaagcttcgcggggagaatggggtgaggcctgagccctgtctcggaaagcagaggggcaggtgggaaagtggaaaagacattcctggaggagagaaccgaaggtgccgaatgtgcagaggcagaggtcctgc

SEQ ID NO: 1009 - DNA, 108 bp, Homo sapiens
ggggagctgtgctcattgaggacttggtctgcttccccaggcccacagctcgaggacgtgagacctcactgtcttttctagcttagaaaacagctcctgccgaaaatc

SEQ ID NO: 1010 - DNA, 802 bp, Homo sapiens
gccagccgccttccctttaaccctcacactgctccagtttcacctctttgctccctgagttcactctccgaagtctgatccctgccaaaaagtggctggaagagtcccttagtactcttctagcatttagatctacactctcgagttaaagatggggaaactgagggcagagaggttaacagatttatctaaggtccccagcagaattgacagttgaacagagctagaggccatgtctcctgcatagcttttccctgtcctgacaccaggcaagaaaagcgcagagaaatcggtgtctgacgattttggaaatgagaacaatctcaaaaaaaaaaaaaaaaaaaaaaaaaaaaaaaaaaaagaaaagagaaaaaaaagactagccagccaggaagatgaatcctagcttcttccattggaaaatttaagacaagttcaacaacaaaacatttgctctggggggcagggaaaacacagatgtgttgcaaaggtaggttgaagggacctctctcttaccagtaccagaaacacaattgtaaaattaaaaaaaaaaaaaaactctttctatttaacagtacatttgtgtggctctcaaacatccctttggaagggattgtgtgtactatgtaatatactgtatatttgaaattttattatcatttatattatagctatatttgttaaataaattaattttaagctacaaaaattatctctttactgattgagtcttttattttaattttgcttcttgctatctctttatgtgtacagttgcttttcagtttgacggtacttttac

SEQ ID NO: 1011 - DNA, 331 bp, Homo sapiens
gcctcctctgcctgcttgcgcgctgccttgagctccaggatctcctgctgcagccgcaggcgctctccatcgaaggccctgcgcgcctcctcgcgcgcctcggtcagcagcgccgtcttgaccttgtcggccgcgccgtcgcgcagcacgttcagcgtggcctgcagccgctgcagctcgccctccttgatcttggcggtgcgcgccgcctcctgctcgtgctgccggatgagcccctcgcgcagcgcctgcagctccttggtcttctcctcatgcagcttggccttgagctccgaaatgtaggccgtgtgccgtcgctgctcctgctcgc

SEQ ID NO: 1012 - DNA, 73 bp, Homo sapiens
gcggcgctgagcgtggcggcgctgagcgcagaccagtggctggcagtgggcttcccactgcgctacgccggac

SEQ ID NO: 1013 - DNA, 145 bp, Homo sapiens
gccactagcgacgcggggagacatatcacccccctatcgccccctggatatgctgatccacatcgcaggggggtgaggcaccccccgcgacgcggggagtaagagccagcccctcttgccccccctgcctcttaggacccccatc

SEQ ID NO: 1014 - DNA, 70 bp, Homo sapiens
ggactcccgtgtgcaattatcgacgctaggccttggggatacggcccactatggaccgagcacggtggcc

SEQ ID NO: 1015 - DNA, 524 bp, Homo sapiens
gcgttggtgactgcaatagggccacctccctcaaattacgttgctctctatgacccatcctcagtctcccagttcaagctaatcattgacagagctttacaatcacaagcttttactgaagctttgataagacagtccagcagttggtggcaaatgaagccaggctgtgcggcaggatctccagggaatgaatggattttcttcagcactgatgaaataaccacacgctataggaatacaatgtccaacgggggattgcaaagatctgtcatcctgtcagcacttattctgctacgagctgttactggattctctggagatggaagagctatatggtctaaaaatcctaattttactccggtaaatgaaagtcagctgtttctctatgacactttccctaaaaactttttctggggtattgggactggagcattgcaagtggaagggagttggaagaaggatggaaaaggaccttctatatgggatcatttcatccacacacaccttaaaaatgtcagcagcac

SEQ ID NO: 1016 - DNA, 759 bp, Homo sapiens
gatttctaacctagtgtgtgttttacatcttccctgtactttgtcctccatgatttggaattgggagtacagaggcatggtcagaaactgttatctccctcaagcctgtgcaggcaccttgatgttcatgcctatctgggctgtgaatagtgcctgttttagtacatctagaggacttaggggactgcagagcatgtcccctaatgtccaatgccctcatttcacagaaatgtgacatttcataatgtccaatgccctcatttcacagaagacaaaactgaggctcagagtccttcaatgcctgaccgaggtccccaagtcaggagctggtaaatctaggctgaaccaaaatcccgtagtaccacaaacaagttacagcagaaactcttcagtgtccactacacctgattttctgttttgtttgtttgtttgttgttttgttttctttctttcttttaatctcatatgggactatctcctcacaaacatttttggactcaattaaagaataactaatggctagtaaatgaatagatgggtttagggagactaatcaaagagacaccagcttggacctacctccaatggcattgagagtgataatgtgaaaaccatactgcggacttttttttttttttttttttgagacaaagttttgcgctgtcgcccaggctggagtgcggtggcttgatctcagctcactgcaacctttgcctccaaggttctcctgcctcagcctcccgagtagcagacaggcac

SEQ ID NO: 1017 - DNA, 359 bp, Homo sapiens
gtaaatctgtggccactgaaatatcctctctccacctgccaataacttcttaaacacacatttttcatggaaattgttattagccaagctcttctctgccctctttagggacacatcgccgtgcagattcagccaggtacttgtgggttcggttgataagactgagaattcctcgttcctcagtttcctcgtttgtaaaaatcgagcttgtaaaaatggtatctatctcacggctttgctgtaagaatcgaatgaaataatgcacacgcacttgcacaaaacccgctatattattattacattctactttaagactgaaaatcatgcaaaaaattgtttgcaaattcaagccagatatc

SEQ ID NO: 1018 - DNA, 360 bp, Homo sapiens
gattgcattccattccattgcattccattccattccattccattccgttccattccattcgtgttgatgccattccaatccataccattccattccattccattccgttccattcctttcgtgttgattccattccattccattccactccattccaatccattacattccactcgggttgtatccattcctttccattccaatccattccattcctttccaatccattccattccattcaattccacatggattcattctattctttccattccattccgttctgttccattccagtccattccattagataccattccattccactcggggtgattccattcaattccattaaattcc

SEQ ID NO: 1019 - DNA, 367 bp, Homo sapiens
gtcattcccattgttttgggtttctggtttagcacatcactcccattgttttgggttccagttttagcacgtcactcccattgttttgggttctggtttagcacgtcactcccattgttttgggttctggttttagcacgtcactcccattgttttgggtttctggtttagcaggatgctcccattgttttcagtttctgatttagcaggatgctcccattgttttgggtttctggtttagcaggtcactcccattgttttgggttccagttttagcacgtcactcccgttgttttgggttccagttttagcacgtcactcccattgttttgggtttctggtttagcaggtcactcccattgttttc

SEQ ID NO: 1020 - DNA, 414 bp, Homo sapiens
gtttcagccctgtttatgttacacctctttcagccctgctagtttgcaggtcccgagttcttgtcctgagtccaggaagaatgaggtatgtgggcaagtagaaggtgagcaaggtgaagaggtgctttattgagcaacagtacagctcagaggagaactgcagtgggtaactcctttctgcaggcaggtcatcccaacgtctgttcagctctcagcagctgagagagacgcactgtggttagctgtgcccacattgccgaggctgttcgagctgaggagtgccttcaggccagtgctgagccactcttagccccacctcaacctccctcttgtgctcgtcactgcccaaattctggagggggccgaggtggcagggggctggcatgtcagcactgccctgagcttgcacaaacc

SEQ ID NO: 1021 - DNA, 367 bp, Homo sapiens
gagtagatttcatctcaagaaaccactttctttgctcatccgtggaagcaactcacccactcacgttttctccagaggctgctgcagtctcgccagatcttcaggctctgtctctgattctagtgctcttgttatttccaccatatctgcagttacttcctccacagaagtcgtgaacccctgtgtcatcagtgagggttggaataatcttcccaacttctctctctttcttttatttttttgagatgaagtcttgcctgggctggagtgcagtgatgcgatctcagctcactgcaacctccacctcccgtattcaagcaattctcctgcctcagcctcccaagtgtttgggattacagtcaccccc

SEQ ID NO: 1022 - DNA, 744 bp, Homo sapiens
gttcagcctcagtggctgtctctcatggacagggctgttgttgagtgcccatagcttttccacaccaggggtgcaagctgtttgtgggtctatgaatctggggtttagagagtgatgcctccctgtgtgggggcttcaaccttatatgtcccttctttgctcccctagtagaggttccccataaggctctgcctcttggaaaagcttcttcctgaacatccaggattttctgtacatcttctggagtctagacgggagctcccaagcctctagtctctttctctgtgcacctactggcttaacactatatggaaacctttaagactttgagccacctctgaagcaatgacccgagctgtacctgtatgtctttcagccatggctggtgctggagctgcacagatgcaggcagcagtgtcctgcggttgaacacagcagcagggccatgggactggcgtaggaaaccattcttctctcctaggccccggggcctgtgacagcaagggctgctgcagacttctctaaaataccttcaaggccggtttcaaactgtcttgactatttgcactgggttcctttttatgcaaataccctaagccttcttgaattttccccctcaaaatcggcttttctttttgactacttggccaggctccaaattttccaaactttagatctccacttgaagttccaacttgaagtcatttcttaggtcacccttaagaacacaggctgttcaatgcg

SEQ ID NO: 1023 - DNA, 1555 bp, Homo sapiens
gcccagtcctactgaactacagaatgtgagaacagaaggtctgaccatggagtcgagagctgacaggaatgtcaccatcatcctgctctccaaggactcctcatcttcaacagactcctcatcttcaatgggcagggtggaaactgcaacttgtgccatgatccttgcacaagaaaagtagtaagaaaatgagtggtagaaatccagtgtcctaaactcacatccggagctgtgagagttttttactggctggataattcacagttttcttgaatcaggggaaaaataagactcagaaactaggagttttgcccaaaactctcatcagatacagaatccatccgctaactatctagtattatttccataagttagatcaattatcactcccaaaacaaatgcacatggcacccagaatctgtgcatttctcccaagtaaaagaggaggtggacgggcgcagtgtctcatgcctttaaccccagcactttgggaggccaaggtgggtggatcacctgaagtcaggagttcaagaccagcctggccaacatggtgataccctgtctctactaaaaataaaaaaaattagccaggtgtggtggcatgtgcctgtagtcccagcttcttgggaggctgaggcaggagaatcacttgaacccaggaggctgaggttgcagtgagcagagatcacaccactgcacctcagcctggatgacagagtgagactctgtctcaaagaaaaaggaggggaggaaaggaggcaaggcactttacaacccagtgatgggctaccacaactcaacacagcaaagagttgccaagctccctttctcccgtgcacaacccgacacagaagagttggtgcagtggaatgaggctggatggagagaagttcctcttctttctttccttttttttttttttttttgagatggactctcgctctgtcacacagcctggggtgcagtggtgcaatctcggtccctgtaacctctgccttatgggtttaatcaattctctgcctcagccttccgaatacctgggattagagtcacccccccaccacacccagctaatttctttttttttttttttttttttttttttttttttttagtggagactgggtttcgctatgttggccaggctggtcttgaactcctgactttaggtgatctacccacctcggcctccaaaagtgctaggattacaggcatgagccgctgtgcccagccaagaagttcctcttcttacttagaaaacagatcacagggcatcaagtaacacgtaaaatcctttataataagcagtattatttttggaaaacctttcctaatattttggtatcagcaaaaagcctcagattaatttcaaacactataaaaatacaatacataaacagaaaatattaactgtcagcaaggctatagagaaattggaagctgtatgcattgctttttggaatgtaaaatggtacagcccactgtggaaaatggtttagcagctccttaaaaatatgaagcatagaattatatgatccatcaacaccctttaagc

SEQ ID NO: 1024 - DNA, 91 bp, Homo sapiens
gcccctgggcagaccgcctggcttggtcgcagccacggcgacatctagccccagttctgcgaggctgggcgcgccagccagcttgggagtc

SEQ ID NO: 1025 - DNA, 125 bp, Homo sapiens
gcagtgaaattggtgagtttggtggtgatttctgggtgcctgcaacggactccagctgaagtgtgggcgtgtttggagagtagctgggacagacaggcgagtccctgagggttggagataaagac

SEQ ID NO: 1026 - DNA, 646 bp, Homo sapiens
gggcttggtggctcacgcctataatcccagtactttgggagaccaaggcatgtggatcatgaggtcaggaatttgagaccagcctggccaacatagtgaaatcctgtctatactataaacacaaaaaaaattagctgggcctggtcgggggtgacagtaatcccaaacacttgggaggctgaggcaggagaattgcttgaacacgggaggtggaggttgcagtgagctgagatcgcatcactgcactccagcccaggcaagacttcatctcaaaaaaataaaagaaagagagagaagttgggaagattattccaaccctcactgatgacacaggggttcacgacttctgtggaggaagtaactgcagatatggtggaaataacaagagcactagaatcagagacagagcctgaagatctggcgagactgaagcagcctctggagaaaacgtgagaggatgagttgcttccacggatgagcaaagaaagtggtttcttgagatgaaatctactcgtggtgaagacagtgtaaacaatgttgagatgacaacagatttagaataaacttggtacagcagaaggaaggcttgacaggattgaacccaatgatttacaataatacataaacttagttggtacagcagtac

SEQ ID NO: 1027 - DNA, 509 bp, Homo sapiens
gagtggaatggaatggaatggaatggaaaggaatggaatggaacagtacggaatgaaatgcaatggaatagattgaatgcgagtggatttgaatggaatggaatggattggaatggaatggaatggattggagtggaatggaatggaatcaatacgaatggaatggaacggaatggaatggaatggaatggaatggaaaggaatggaatggaatcaaccggagtggaatggaattgaatggaatggaatccacctgataggaatgaagtggaatgtaatccaatggaacggagtggaatcaactcgagtggaatggaatggaaaggaacggaatcgaatccaatggattcaactggaaagcaatgcaatgaatttaaatggaatggaatggaatggaatggaatcatccgagtggaatggaatggaatggaatggaatagaattgaatggaatggaatcaacccgattggaatggaatggaatagaattgaatggaatggaatcaaccc

SEQ ID NO: 1028 - DNA, 348 bp, Homo sapiens
ggggcggcggggctccggggctcgcgcatggcgggctgccagtcgccagccatgggagtcgggggagccgggggaggaaggcagctgaggcccgacgagaattcgagcgccgacccggtgggccagcactgctgagggacccggcgcaccctctgcagctgctggcccgggtgctaagcccctcactgactggtgcggtggcgccggccggccgctccaagtgcggggcccgccgagcccacgcccatccggaactcgcgctggccggcgagcacggggcacggccccggttcccgcccgcgcctctccctccacacctccctgcaagcagaagggttcctcaagcgc

SEQ ID NO: 1029 - DNA, 154 bp, Homo sapiens
gcccgtctcccaccgcctttcctgcccccactgcgtccttgacccaggtaggcatctgtgtcatatctggggcccgccctggggctccatgtcttacctgcatcacttttgaacccaatgccgatctccatttcccgcacaccccagcactacc

SEQ ID NO: 1030 - DNA, 159 bp, Homo sapiens
gcccattcattgcccgcgagcgtccatccatctgtccggctggcggtccagcgaaaggggctccaggctggacgcagccgccacccgggggaccgaggccaggagaggggccgagagcgcggctgacccttgcgggccggggcaggggacggtggccgc

SEQ ID NO: 1031 - DNA, 214 bp, Homo sapiens
gcgggcggcaccgggaggcagctgacaggcgtttgcggcttcgcttcatggccgctctcccgccccgcctgggacacctgtgcgccgcgcctctgaggcgcagcatgtgacgcggagacggcatccagtgcggggcgagcctctcagccggcccggatggctacgatggccgagctcttcgaggaggcttttgtggcagatgaatatattgaac

SEQ ID NO: 1032 - DNA, 130 bp, Homo sapiens
gctggcgaaggcgaccacaagtggcaggagcagcaaccccaggaacagcagcccggggcgtgaggcgcagaacccggctgcggagctcatgctgcggcagagcttccagcaggatctcagtgctcagtgc

SEQ ID NO: 1033 - DNA, 250 bp, Homo sapiens
gcccaggctgaaccacagggcagcgctgcagggcctcagttggcctcggatagccagtctcccaatggcctgggatagccagtctcctgccatccccgccggcccgcagttcggctcagcaagcgcgcaggtacccgaggccggtgcggagagtccctcctcctgggaaaccgggtgcggccggaaaggcggccgcccctcacccgtcatgcaacggcacgttcgtggggaacctgacattaaactgttc

SEQ ID NO: 1034 - DNA, 267 bp, Homo sapiens
gaggcattgcctcactcagcaagcacaaggggtcagggagttccctttcctagtcaaagaaaggggtgatggacagcacctggaaaatcgggtcactctcacccgaatatcgcgcttttgggacggccttaaaaaaacggcgcaccacgagattatatccccgcacctggctcggagggtcctacgcccacggagtcttgctgattgctagcacagcagtctgagatcaaactgcaaggcagcagcgaggctcggggaggggcgccc

SEQ ID NO: 1035 - DNA, 328 bp, Homo sapiens
gggtcccatcagtgttcagctggacactgtaagatgggccggcacccgcggagctcaggaaagaaggactgacagcctcactccactgacagcacacgacacaaagggtcactcatgcctggcttcagctgtcacagcagcagaggcgcctcccccgcgaaacaacaagcacatcccctacaatcctgcgaaacaacaagcacatccccttacaatcctgaggcacaccctgactcaagcctccgccccagcgccccgctgacaccggcaactgctgcgcgggtccctggtcacccctcttcagctcccggccatctcgggtcagaac

SEQ ID NO: 1036 - DNA, 841 bp, Homo sapiens
gtcatgtttggcccccgcggcagcctctgccgcagcctcctcctcctcctcgtcttccccctcctcctcgtcatcctcgtactcctcttcctcctcctcctccccctccaaggtccatgcacacccctccatctcgccggtgagctcttggatcttggcgagtaggggcttatagatgtcattatactttttttccagagcctgaaattccttatcaaatttggcttctatcttatcgcatcgcttctgcagctttttgagggccaggactcggcatttcaccgaattaggcaggctctcgataaagtcatttttcggctttggggcattctctgcaggggtctggggctcctcagccatctgaccagccgcgctgtcagggtcaccagccgcgctgtcacagtctccaccctgcgcaccgccttccgccattacctcctctgccgctgcctccgccgctgccgccgcctggctaggctccgcaggcccctggttttccgagtcggccatgttagaggagaagccgcagaggtctaggagggctcccgcagaggccctgcacccgagctggtccagagagatcttgcggatgcggcaagtggcggtgacgtgcggccgcgggaatgacgttggccgcggccccgcctcctgctttcgcggcacttgactggcttcccactatcagctgacggccgtgtgctcatactgcaccagattcctcctgttgctaccctgacatcttctgggccctcaacacccgcctgttggacagacaccctgttcccagcccacccatgtacccacccctgtagagctgggctgggagtgtcagtagctgccc

SEQ ID NO: 1037 - DNA, 673 bp, Homo sapiens
gaggaggcagtctgccggttctcagatctccagctgcatgctgggagaaccactgctctcttcaaagctgtcagacagggatatttaagtctgcagaggttactgctgtctttttgtttgtctgtgccctgcccccagaggtggagcctacagaggcaggcaggcctccctgagctgtggtgggctccacccagttcgagcttcccggctgctttgtttacctaagcaagcctgggcaatggcgggcgcccctcccccagcctcgctgccgccttgcagtttgatctcagactgctgtgctagcaatcagcgagattccgtgggctgggcgtaggaccctccgagccaggtgtgggatatagtctcgtggtgcgccgttttttaagccagtctgaaaagcgcaatattcgggtgggagtgacccgattttccaggtgcgtccgtcaccgctttttttgactcggaaagggaactccctgaccccttgcgcttcccaggtgaggcaatgcctcgccctgcttcggctcatgtacggtgcgcgcacccactggcctgcgcccactgtctggcactccctagtgagatgcacccggtacctcagatggaaatgcagaaatcacccgtcttctgcgtcgctcacgctgggagctgtagactggagctgttcctattc

SEQ ID NO: 1038 - DNA, 1140 bp, Homo sapiens
gtgattaaatctcattaagcatatgatttaatcccaaatagaagctagaggtgtttagagacaagaaggaagtgtaggaagacaaaataaaatacagcatataatcattaattcagaaaaagacaagccactgaattaagttcagggtaaatagcagggaagtggtttttataaacacggtatcacccaaaacaccattcccactaataagtgataaatttgtttagcattttacaagaccaaagtagaaaagtaaagcttctagaaagatgtagcacagaaaagcctcccccttcctttatcaggatccacaatttttaaaggaatagaaaatcaaatcctcaatacttgaaagggaactctaaaaaggacccaggggagaaaaagaggtaccgaaattaccaaattggagggcaaacttcttttatactgtaaaagcatacaacctagccaggcatccatagggccattaagcggatgagtgggaaggcagggacggatgaggctgcagtagtcgaaagcctgaatgaattctctgcctgcgtattttccaatgaagctgaaggtcacgtcccggaaactggatacattttcttgaggggaaaagtggaatgttaaaaggattttatgatcacacaagagtagatagttgagcaattagaactattaaaagttgacagggcacaagacccagattaagtacgtcatagaaatcttaaagaagtggaaaggaaacaggaaatgccttcagcagcatttcttgatagcttgttcagaaggagactgaagaatcagggctggtagctgttctaggactagttgtttaaaagaaatctttgggatctttagaaatctagccagcaataatctgagtcatggttgaaaagcagatagtgctgaccatcagaccatcattttgcttttatagaaatacagaatttggtgaacagttaacataagcttgataattcaaaaataattgacattttcacagaaatagagcatttttgagctattctgcacaggtgaaaatggagttcacttactgcttctaaatttcttacgttatttattagagacagtgcctctagaatttgtctgcattaagtgaaatagtggaagagtaaacaaaaataaaac

SEQ ID NO: 1039 - DNA, 282 bp, Homo sapiens
gagaagcgcgtgccgtcctcgtcgtaagcgtagaagtcgtcgtcctgcagctcctgctcacaggggctcagagtgagacgcttgctggccgcgaagccagggtggttgaggatggcctctacgatgcgcacgtagcccttgctgatggcgagcagcagggcgtcgccaatgcgcgccaggttctccttcttgagcagcagctcggtcacctccaggtgctcgttgcccacagccagctgcagcgcgttctggcccatgtagtccacgcagttgacgttcagc

SEQ ID NO: 1040 - DNA, 63 bp, Homo sapiens
gcccagtggatcccgcaccggggctgcaggtggagctgcctgccagtcccgcgccgtgcaccc

SEQ ID NO: 1041 - DNA, 69 bp, Homo sapiens
atacgatacgatacgatacgatacgatacgatacgatacgatacgatacgatacgatacgatacgatac

SEQ ID NO: 1042 - DNA, 491 bp, Homo sapiens
gcatatcctgggaaggcactggcctctttttagcatttgcaatttggtttttaaatgttgctgtatagcaggaaggcatgttaagaaaaagcgtgtgagataagatggatttttttttggaaaatgctgtttgcagctctcatctgagtaaggcttggatagctctgttctcagagtttatttctgctgcagtatgataaaggtggagaacgacctgcccgcagttttacgttgcataatggctggatggggtcctttagctgctgaattgctctcttatatcacagctgatcagaaatctggtggttttctctggggaagagtctcagcccagccgcctctgaaatgatgagaggggaacagattctggaattcccgagttccttatttattgctgagaccaaaaggtctgtgtgtggatgcatctctgtgtgtttgtgcttacttacgagtgtgtgctgaggtgggggcacttgggagaagaaaatctc

SEQ ID NO: 1043 - DNA, 277 bp, Homo sapiens
ggcgccctgcgctctccgccttatttccgctctcccccgctgccttccggccgcttcccacctgtgctgcatttcgtgttattttcctgacacgcttacgccgacgaccaacgaccgctgcaggcccgggccgctgcctggccgttgtagggtccgcgcgtcccctggaggctttggacgccgtctggggcgtcccgacggctgggtgagattcagcagtctggtttcagaattgaattcaggctgggtgagctttagcgggctcctagtcgtttgc

SEQ ID NO: 1044 - DNA, 239 bp, Homo sapiens
gcccgtcatgctttctcataggatggggagtgggggaagcaatgcgtgctctgtgtgtgtgtgagtgtgagtgtgtgtacatggaaacacactctcttttgctcctctcccctaggtttttcctgtgctccagaagttatcaaacaacgaaatgggaaatgggacatgttcagtcaaaattcctgttggcacgcttacccacccacctttttcatattgcgtaactaggtgaatcgccc

SEQ ID NO: 1045 - DNA, 172 bp, Homo sapiens
gcccctcccccagcctcattactgccttgcagtttgatctcagactgctgtgctagcaatcagcgagactccctgggcgtaggaccctccgagccaggtgtgggaaataatctcctggtgcaccgtttcctaagcccgtcggaaaagcgcagtatttgggtgggagtggccc

SEQ ID NO: 1046 - DNA, 426 bp, Homo sapiens
gcagctgcaaatattgcaccaacaggcaagaacgcgcctggagtctctgcaggcgcccgttggccacctctgctgaagtctctcttgtactcagggctctgactaataataaaaggtcagtgattggaggctgtctttatctcagctacttaaaaaaaaaaaaatttatgtcaagtgagcactttacatgttgttcacccacttagccagtgcttcctttgaagctgaaatagattgcttacataaaatgctcagagctgcctccacaaagtcttctcatgctgcttgcctcccttaaagctgcggcttcctaatcctttgatcccgataccgctgaactctttgagagtgaaacagaaaggacagagttgagattttagtgtgacaagtggaagaaaatcaattttgacttcccaaagatagaac

SEQ ID NO: 1047 - DNA, 413 bp, Homo sapiens
ggagcacgaaaacaagtccgacagtgagaatggtaagtttcctttttggctttataatgttggcattcagtgcttctgtctgttttggttgactccgcggggggggatgtttttctttctctccttcctctcatccttctttctctctctttcttgtccatttctttttgttttaatgtagtagaactcaagaaatgtccttgaataatgcattttttcctggaaaaaaaaatcaatatttgacatcagattgttaaattaggcaagcagtctacaatgttttggctatagttttgaaaaacaggttaatcatctacagaaaaaaaaaatagctttgacttctcttggaccatgtcacctgttgtcttctgtggggtggcaaagcacgtgttgataaagtttaccccagagcc

SEQ ID NO: 1048 - DNA, 150 bp, Homo sapiens
gaaggccaggaagatgccccgcatgtccatgagctcgttgtcgtagccgtgccatccacgctgccaaccttcccgcctgccggtgctgttcatccaaaacggaagcatctctcgattctgaaaccaagcaaggcagacacatgacactac

SEQ ID NO: 1049 - DNA, 565 bp, Homo sapiens
gtgggaccctgtgctccaggcaggggcacctcactgccccctgagctcattttacccctcctggctctgcagcatttctgaccatttctgcccaggccgagactcactgctgcccagagcaatctcccttctctccttctggaggggaggggttgtatgttacccgcctggttttatccacagaggttagcagagactgatacagacaaaccctttttctttctaattttagattcaagagcacatgtgcaggtttgttaaatttgcctgacgctgaggtttgagtttctattgatcccctcacctgaatagggaacacagtacccaatacacagtttttcaaccattactccccttccttcctccccctattttagaatccccagtatgtagacaaattgtttacttttatagctgtaattaaccttattatagctcagcctcaaccctttagagaggaggaaactaaagcccatgagacttgcttaaagatactaagtgaacatatttattttttaaagtgttaaagtgattaaacaatgtagacgtgaatgaaataaaaagc

SEQ ID NO: 1050 - DNA, 132 bp, Homo sapiens
ggtgtcccgggctgaggccgggcgtgttcttccggtgttccgggctgaggccgggcgtgttcttccggtgttccaggctgaggccgggcttattcttccggtgtcccaggctgaggccgggcgtattcccgc

SEQ ID NO: 1051 - DNA, 206 bp, Homo sapiens
ggactcccctgggacgtgggtggcgcaagcaccccttggccctgcggccccgcttgagcgggcccaggctgtgccaccgcgcaggggcccggcaggccgtcgcgctgcgcgtcccggtcctcccggcttttgcccgggtgcggaggccaccgaggagcctgagggtgggagagcgccccgtccggaggagccggggcggcgtaggc

SEQ ID NO: 1052 - DNA, 106 bp, Homo sapiens
gggaagccccgttccccacgcgccggtgtgggcgaaggcgacccacgagggagcagggtgacccccgccaggggccgcgctgcacaggccgcctgcctgcgcgggc

SEQ ID NO: 1053 - DNA, 132 bp, Homo sapiens
gccccggttccggggcccagggagtgggcggtttcctccgggacaaaagaccgggactcgggttgccgtcgggttttcacccgcgcggttcacagaccgcacatccccaggctgagccctgcaacgcggcgc

SEQ ID NO: 1054 - DNA, 81 bp, Homo sapiens
ggggcgctctcccaccctcaggctcctcggtggcctccgcacccgggcaaaagccgggaggaccgggacccgcagcgcgac

SEQ ID NO: 1055 - DNA, 176 bp, Homo sapiens
gccccctccaccgggctgaccggcctgggattcctgccttctaggtccaggcccggtgagagactccacaccgcggagaactgccattctttcctgggcatcccggggatcccagagccggcccaggtaccagcaggtgggccgcctactgcgcacgcgcgggtttgcgggcagcc

SEQ ID NO: 1056 - DNA, 92 bp, Homo sapiens
gcccgggcccctgcagccgcccagctgccagcacggagcgcctggcggcggaacgcagaccccaggcccggcgcacaccggggacgctgagc

SEQ ID NO: 1057 - DNA, 73 bp, Homo sapiens
ggtggcctccgcacccgggcaaaagccgggaggaccgggacccgcagcgcgacggcctgccgggcccctgcgc

SEQ ID NO: 1058 - DNA, 330 bp, Homo sapiens
ggccccaccacagggactgcatttgcagctgtgtgacaaagctatttcctctccttatttaatgtgacaaatacgtctgctacccaaatctctcaagtgcacaggctcaggagcacattccgtcgcccacccccgggggacccagctatggaagtgtctcaacccttcctggccccctacgtgcacccggcttcatccttggcccccagggacggcggcccttcacctgcagacctcagcctcaccctgtataaagctctgtcttcctctgctgctacaagaacccactgcagatgcagcatcagccaggatgcttccacatccccccgc

SEQ ID NO: 1059 - DNA, 339 bp, Homo sapiens
gagtctccctggtcgggtgggaggcctaggggccgagtctgcctggtcgggtgggaggcctaggggccgaatctgcctggtcgggcgggaggcctaggggccgagtctgcctggtcgggtgggaggcctaggggccgagtctccctggtcgggtgggaggcctaggggccgagtctgcctggtcgggtgggaggcctaggggccgaatctgcctggtctgctgggaggcctaggggccgaatctgcctggtggggcgggaggcctaggggccgaatctgcctggtggggcgggaggcctaggggccgaatctgcctggtcgggcgggaggcctaggggc

SEQ ID NO: 1060 - DNA, 156 bp, Homo sapiens
gcagaggggttcagctcaggggacggcgccgacacaggcccccgcagaggggctcagctcaggggacggcgccgacacaggcccccgcagaggggcgcagctgacgggagggcgacaacacaggcccccgcagaggggctcagctcaggggacggc

SEQ ID NO: 1061 - DNA, 377 bp, Homo sapiens
gtttccttctttgctcttaattcttaaattctgctggtatttaatattttcaacttccaaaccttcacacgggtatctttactaatgtagatcagattcatttgtgttcctggttgctacagaattagaaaaacaggaagagaatgaacaaagtaacgcatctccgtggcaggttcggcaaccctcagtgttcaagtttcagctgtgcacggcagggcctgtctgtgggatgtagacatgagccgcccaagtcacagcagaaggcgagaggattccggacctttgcggccacagcgaggacatgggtgggaggggaagcatgggatttgaggagggtgaacacacacacaccattagtagttgtaagttttcagcac

SEQ ID NO: 1062 - DNA, 151 bp, Homo sapiens
gggtgggcaggtggctcttgccccttggattgaggagcacgggggtcagcctcacggcccagggtggccggcgccagctaatgaggctgtggtcccgcaggagctgttcccctcgcgtcaggagaagctctacccgggctgggcgcgcgcc

SEQ ID NO: 1063 - DNA, 73 bp, Homo sapiens
gtcgagaaagggtgggaaatggagccaggcgctcctgctggccgcgcaccgggcgcctcacaccagccacaac

SEQ ID NO: 1064 - DNA, 304 bp, Homo sapiens
gggttctacacctcaggggcggcgctcagagggacctcctgctgccggggagggaggagcaaagtctgcgtggtccccggtctgcgtggtccccggcagctcctccctgatctgcttacctaacagacctcggacggcctcaggagccagggacacaggcgcaggctcccgcgtgctcgccggctgtgttgttaaacatcttcatgcaccagccctcccggcaggcccgggcgggcagagcagcggaggagtgctcgggttcagaccgagtcagggtcagcctgctggtcctcaacgccgttcc

SEQ ID NO: 1065 - DNA, 436 bp, Homo sapiens
ggtgcactggcaaaggaagccacggtttccccgtttcacattaactgggacccgttatcggggtgtgacctctgccagaagcagaaagtgctgattcctgcacaaccggtaagtgatgagaaggtggaatctcccttctgccagttacaacggtgattgccatgcaaggaagttaatgttttgtggaatttacaacccgatattaatggtttctcttccagcactctcttcttactttgttttcaccccgatttttttttttaacaacaaaggaaaccggacaatatgtgaagcttcattaattctctttagttttgatttttcctttctttttttttctcccctccttctggaggttaagcgagaggcttgtcatggggcctttccataaactctggttcatgggagggtgaaagttacagtctcgcctagaagc

SEQ ID NO: 1066 - DNA, 251 bp, Homo sapiens
gtttgcccgacaatgtcacagggtcatgaaaaaaaccaacacaatatgcttctccaaacccacctcatctgaacgccggctcgagtgtaagcagagcccagggggtgagcgggcagaacaaaagcagccctctgctaattgactgaaaaattagcccagttgccccatgggaggcacgggaggctgcagcagatggaggctgcttgggcgcccggctcagaaagccactcgcaacctgctggggctctgcc

SEQ ID NO: 1067 - DNA, 428 bp, Homo sapiens
gtcaaatgtcagatatgtcgaggcatgggtagccttctaaggggtcacgtctatggaaggaaaaagtttggcttaacaaataggaaagtgagaaaaagaatgaaacagtaaaataacaggatctcgtgatggggaaaaggcggcctgcccagacctaaacgcctcgcggcctcgcaggcgacgcggggatgactcagcaggacagaagggagggaagctccagacgccacggccctcttcgagatgaaagtacctcccatcctaagggactggcgttccaggaacagctgcgctggctgagccggctcagtgaggcggagcggccaagccttcagtccactcccactccccgatgaaaaacccaagaccgggtagcgcagcccctccgcgcacgcgtaacacgaggagacaccgcccacacgccagac

SEQ ID NO: 1068 - DNA, 43 bp, Homo sapiens
gggcgggcgggcggggggtgggggcgggcggggggggcggggc

SEQ ID NO: 1069 - DNA, 652 bp, Homo sapiens
gcccaacagaacggttaggaccagcgagcacgtgcaccttagccggccccgcccaacaggccctaggcggagaaaccgccctagcagctctctcgcggcgcccagtgcaggccgcggttgctgctcaggtgccgccggctggcggggctccctggagcgcaaggcgcgccctgccccagggcctgtttgactgtggcctgcgcgctcttctcctcttccaccggctcccgatgctccgggcccccgcgctgggccctctgcagcccagggatggggttgagtggtgcttctccgcctggtgccgcccgtgggcccacagcccgacttcgccactgcgtcgcccccggggtccgtgctgatgggtgtgaggcgggaggacgggatccggggttgccactgctgcagccagcgcaccacttgcaggtggcagctgcagctcgggctccggcgggggctggcggggctcccctgggatggcctcctgggccctgagtgcgccgcccatccggccagagggtgcgcgcctcctacaccccgggccaaagcccatgcccggcgctcctgccgcagactgcctgacttgccgcggccgggctggccccggggtccgcgcggctggaggcgcccgcctggtcggagattcccaatcctc

SEQ ID NO: 1070 - DNA, 44 bp, Homo sapiens
gcgctaccattcggtggcctcggctctgaagagccaccggaccc

SEQ ID NO: 1071 - DNA, 169 bp, Homo sapiens
gtagctctccagaacgggaaggctgtactgagccggtctcgggagacgaaggatgggatgtgaggcggtcctgccttgccgccttctgtccctagtctccgggtccccgccctccagccgcctttgattcgtgactgggtcacggtcctcactcattcctcagaaccgc

SEQ ID NO: 1072 - DNA, 1727 bp, Homo sapiens
gttttacctatagggatttattcaaaaatgcaacctaataaaagagaggcaggaagagaaactgagtgaacaatgagggtatgtaagatatatgcgtgtgagaagttatgtaaaatgtagtttaacatagatatagagagtggaatgataggcaatggaaactcagagggggaaagaacaggagggggtagatgatgagaaattatttaatgtgtacaatatattatacatgattcagatgatacatcccctaaagccttgacttgaccactatgcaatctatacatgtaacaaaattgtacttttaccctatgggtttagagatttttttaaaattaagaaataaagtataatgtcatgaagaaaatgcataatagataaagcaggatttcaaaaaatatcacaaaacaggacatgaccaaagatgcctgactctccacagagcccctttctaccaatctctgctgagactctcttcaagagaccattcattggatcttattgaatctgcttccatttgcatgccagtcacatactatgtcaatatttggataaatttttgtttatttagccctcatctctgtcttgtttgtttgtggaaactcacagaacctgtcttagtgaagtatatataagatttcaatgtatgtgttttggattgaataatttgattgtatatttatattcaaaatagcaaaacgaatattttatttctcttagattttgtcacaatgtattccactttctcagattatatacattaatttcctatctttgggtctttcaaaatattttatgaagaaaagagtagggagaatctattaaataaaacaaatatagaataataatgtatcttataaagtttcaaggatttttctatcaaagagatatcacatcatccagcacttctagttaatgactccaaagagacatcatacatttagtttacataaacttcattctgtgactttatttgtgtgtgccttcttggagaagtgagctcacgaataaacttccttggtattgattgccatggatgatttcacaggttaagaaaggggcaggggaaacaaaagtgtacttggctgaagggcttttgtgaaaaataaggctgcctcttgagtggtcaagaaatatcacaagaagagaaaaatggtaatcagaaatttatgtaggctggttgcaagtcacactgacctaaggagagtcctgagatgaagtaaattattttcctctatgtcttggacagcttatccttatgtcactgtgacccaaccagtttccctggatacagccagtgtccatgtgtagggggctgaaagaacaagtgaatctacatttatgctcttcatcacacaaaaaaaatgcaacctaaattttaaaagcaagtgcatgttcatttctaaaacaccaaaaacaatggcaacaaaagccaaaattgacaaatgggatctcattaaactaaagagcttctgcacagcaaaggaaaccaccatcagagtgaacagacaacctacagaatgggagaaaagttttgcaatctactcatctgacaaagggcaaatatccagaatctacaatgaactcaaacaaatttacaagaaaaaaacaaacaaccccatcaaaaagtgggcgaaggataagaacagacacttctcaaaagaagacatttatgcagccaacagacacatgaaaaaatgctcatcatcactggccatcagagaaac

SEQ ID NO: 1073 - DNA, 841 bp, Homo sapiens
gaagctgtatcaggtagcacaaaaaagcctatgatgaacaaggaaatatcttcagataaaaactggaaagaagcgttatgagaacctgctttctgatgtgtccgttcatctcagactgctaagtcattcttccaatggaacagtttggaaagactgtttttgcagcatctgcaaagggatctttgggagcacattgaggcttaaggtggaaaaggaaatatcttcagagaacagccagacagaagctttctgagaaactgcgttgtgatgtgggcattcgtctcatagagttaaagcagtttttctcattgagcagttttgaaacactgcttttgtagaatctgtgatgggatatttgggagtgcattgaagcctatggtgataaaggaaatatcttcaaagaagaactagacagaagctctctgagaaactgcattttgatgtgtgcatttgtctcacagagttaaacctttcttttgattgaggagtttggaaacactgtttttgtagaatctgtgaagggatatttgagagtgcactgatgcctatggtgaaaaaggaaatatcttaagataaaaactagaataagctttttgagaaactgctttgtgatgagtgcattcatctcacagagttaaacatttcttttgattgttcagttttgaaacactgtttctgtagaatctctgaagggatattttggtgtgcacatggcctatggtgaaaaaggaaataacttcagataaaaactagaaagaggctttgtgagaaactgctttgtgaagaatacattcttctcacagatttaaacatttcttttgattgagcagtttggaagcac

SEQ ID NO: 1074 - DNA, 1063 bp, Homo sapiens
gtgcattcatctcactgaagtaaacgtttcttttcatttaccagattggaaactctgttcttgtagaatctgtaaggggatatttctgagtgattttagacctatggtgaaaaggaaatatcttcacataaaaactagacagaagctttctgagaaatttccttgtgatgtgtgcattcacctcacagagatgattctttccctgattgagcagtttggaaacagtcttttcttacaatctgcaatgtgatatttatgagtgatttgaggcctatgtgaaaaaggaaatatctgcacataaaaactggagagaagcattctgagaaactgctttttgatgtgttcattcatctcacagatttgaagctttcttttgattgagcagtttggaaacagtctttttgtagaaactgcgaactgatatttgtgagcacgttgaggcctatggtgaaaaaggaaatatcttcatgtaaatactagacagaagctttctcagaaacttcattgtgacgtgtgcattcatctcactgagatgatcttttcaattgagtagtttggaaatagtctttttgtagaatctgcaaaagagtatttttgagccctttgaggtcaatggtgaaaaatgaaataacttcacataaaaacttgacagagctttctgagaaactgctttgtgatgtgtacattcgtctcacaaaggtaaacgtttcttttcattgagcagattggacactctgctcttgtagaaactgcaaattgatatttgtgagccctttgaggccagtgatgaaaaaggaaatatcttcacataaaagctagacagaagctttctgaggaacttctttgtgatatgtgcattcatctcacagagttgaacctttcttttgattgaatagtttggaaacagtctttttccagtatctgcaaagggacatttctgagccctttcaggcctatgattaaaaaggaaatatcttcacttaaaaactatacagaatgattctgagaaactgctttaagatgtgtgcattcatttcacacaggtaaacgtgtctttttaaac

SEQ ID NO: 1075 - DNA, 197 bp, Homo sapiens
ggcagcagccacagtcgtcgagcactgtcctcttgcagcgcgggctgcttttgcactcactgctgtcacagtgttgagggcagtccaccgcataattattgctccaggcggccaccaggtgtgcaggcacgaggagcgtggtcagcagcaagacgctcttcatgtttcccagctgcctccggctcggctctccagtc

SEQ ID NO: 1076 - DNA, 90 bp, Homo sapiens
gcccgccaccacgcccggctaattttttgtatttttagtagagactgggtttcaccgagttagccaggatggtctcgatctcctgacctc

SEQ ID NO: 1077 - DNA, 145 bp, Homo sapiens
ggggaaagactgggttgcactttccagggatggggctgcctgggtcgtgagttgcatgttgccagcctccccttttggaagacagcggggtctggccgcgggggcggggaggcaaaatgacggaagtcagtgagggacaagaccc

SEQ ID NO: 1078 - DNA, 732 bp, Homo sapiens
gccccgagagaggggcccgtgccttggaaagcgtcgcggttctggcggcatccggtgagctctcgctggcccttgaaaatccgggggagagggtgtaaatctcaacacattcaaaagctagcagaaggcaagaaataactaaaatcagagcagaactgaaggaaatagagacacaaaaaaacccttcaaaaaatcaatgaatccaggagctggttttttgaaaggatcaacaaaattgatagaccgctagcaagactaataaagaaaaaaagagagaagaatcaaatagacacaataaaaaatgataaaggggatatcaccaccgatcccacagaaatacaaactaccatcagagaatactacaaacacctctacacaaataaactagaaaatctagaagaaatggatacattcctcgacacatacatcctcccaagactaaaccaggaagaagttgaatctctgaatagaccaataacaggagctgaaattggggcaataatcaatagtttaccaaccaaaaagagtccaggaccagatggattcacagccgaattctaccagaggtacaaggaggaactggtaccattccttctgaaactattccaatcaatagaaaaagagggaatcctccctaactcattagatgaggccagcatcatcctgataccaaagcctggcagagacacaaccaaaaaagagaattttagaccaatagccttgatgaacatc

SEQ ID NO: 1079 - DNA, 122 bp, Homo sapiens
gctgcacagagtgctgtgctcaagttatctcctcatcttcacaattatccccatttcacaggtgaggaaactgaggctcggcgagtcaggcgactagctcagggtcacgggtccagccccgc

SEQ ID NO: 1080 - DNA, 215 bp, Homo sapiens
ggtaggtttgtcgcctctacctatgaatcttcccactattttgctacatagacgggtatgctcttttagctgttcttaggtagctcgtctggtttcgggggtcttagctttggttctctttgcaaagttatttctagttaattcattatgcagaaggtacaggggttagtccttgctatattatgcttggttataatttttcatctttcccttgc

SEQ ID NO: 1081 - DNA, 381 bp, Homo sapiens
gtctccttgtgactcatggcaccagatgacaagcaatcctctgtccttcagcagcaccagaaacagtggaggatccgtgtgggtgttcacagcgttgtgaatagatctagtgggaggcaagagtccaaggctcaggcttcctgcacgtaccaccatcctgacagatggcatattcttggccagaatccaaggaccttggtcaccgagtgaactttccctgactctgtgctatgtcgatatcccagacacacagggacacaggccttgcttatgaatcattctgctagaagctgcctctatgtgtgttttctgaatgaatgttcataaaggtattttgcctaaaccaagtaagactgttcagcactttgtcacacaattacc

SEQ ID NO: 1082 - DNA, 536 bp, Homo sapiens
gtatcaaggcagaactatgtgcaagtcggggcactgcagcctcagctcaacagaaattccatctcgccttttatttacctaatttctcagcaaggttcccaggcccttaagaaggccgagctggaaagtttagttgggctcttttttgttgttgtttaattccactattaggaaatgaggcctacctttgaattatttcattatgatttggccttttgggggaaggggtgggaactataatcattagtggctttttattatttctacaataaatggctagattctttgttgaataagctgcttgaatgttttgcagatgttccacttagaccaaatctgaccccctatttcctcccaaataagtcgcttaaactctccctccagtccatttactggagaacatcctccctcaacctagcaagttgataagcctaggacatattcttatgaaatttcacctaactgcacatgcacgcacacacacacacaccacacacacatttacacacacactcccacccactgagcctctgagc

SEQ ID NO: 1083 - DNA, 76 bp, Homo sapiens
gggcgagagcggggcgggagccgggcccggcgcccccggagccagcggcgcgcggctgacaaggctggaccctcgc

SEQ ID NO: 1084 - DNA, 388 bp, Homo sapiens
gctggactgaaagggtggaggctgcggacgtatcctgttgcaggcgctgcctacccagtgctgggagaaaaagaaacagtcgcagacacgcacactcacactcgcaggcacctggggctccaagagagagttaaatctccttcgtggagtaccaaagcctcagtccatggtgtcagccctgagactgtctgcattcgcatggagtgggcacctccgctggggacagattacagacgcgtccggcccaaggaatgctttggagagctgggagtggggctgcaagaagggtactgtcttccaagtgtcttggctcagcacacacgctcacacgcactctcatgcctctgaggtggagtgaaacagggcagggaggggtaaggaagaggac

SEQ ID NO: 1085 - DNA, 192 bp, Homo sapiens
gctggggccagccggcggctccgagtgcggggtccgcggagcccacgcccaccgggaactcgcgctgctggcctgcaagcatcgcagcgcagcccctattcccgcccgcgcctctccctccacacctcctcccaagctgagggagccagctccggccttggccagcagagaaaggggctcccacagtgcagc

SEQ ID NO: 1086 - DNA, 67 bp, Homo sapiens
gactgtgggtacgttcgtagtttgagtttgctaggcagaatagtaatgaggatgtaagtccgtgggc

SEQ ID NO: 1087 - DNA, 407 bp, Homo sapiens
gctcctgatgttcgctgttcccaaacccctataaggatccttcagtccaacctcttgggtggggaacagagggggtccgtgaatctccaaggtccttctcctgcttgccaaactgagggaggaactcccactagccctaggtgtagcagggggcccgccagcagtccctggggctctctgcttgggggcgggcataggaggggaggtgcacactggagaggaggcgcgcgggaccggaggcgcacaccggaggggaggtgcccccaccaaaatttaagtgcggcgcaacatgcaccacaggtaggggcactaccagggcaaaaagacttggtgaatgcgagggccgggcctgatcaaaggtgcgtatggtggtaccagagcaaggcggaacagctgctcagtggtcc

SEQ ID NO: 1088 - DNA, 1055 bp, Homo sapiens
gctgtaagtacagcaaggggagaggcccctgcccttgtatggcttctaggggggagcccccacgctaaaggtaaagacaaattgcataaaatgtctggacacgatgcgaacaggtgagaatagcgtaggtacaggccgccagggaggaagaaacttggaactttcaaagacgtaaagaaaaattcggagcgagtctcactcgctgtggtccaacaggcaagtcctggcgggtggcaatatatgtgaaaaaaacagtcatacagataaaacagtagacggcagctattgctgttaaacttccgtcctacttgggacgaaatccataacgcactccgcggtccgaagttgtggggtctcggagcttccaggtgtgtctcgtgaactgcacaagcatttttttgtccccatgcgtcctacctggcagtacaggctggtcacgcacgccctgtaagaccagtggccagcctccatactttctgtcacaccttcaaagtgacaccaacttatgttatcagcctattaatttagcaaagttaaaagggataaaaaataacaaagccttcagagtgacagattataccgaatttattgcataaaagggtcagtaagcacccgcgggtctcgaaccccagcacagagatggacagatagaaagtccggcatgaggaggtaaccgcttgagctaactccgacccgggtaggagtgtgcgactgaaacttctaaaccatagaagagtgacgatgtggagagggacgggctgcatgtgctccccgcccccgagaggcctgcgtcatgcggtctcgcccgctctgcgccaggcgtcctgctaacgtgtcctggagggactctcagttcctcccgcccgcatcctgcgcgggaaccgtggaagggggcaaaatccacccactggaggggaggcaggagggtgcgggggggcgtgtgggccgtctacctaggtccagcagccaggctgctgaggagtacccccgccaaaggcttttcggggttctctccagcagacgggggcagcctaaggcctccataaaatctcccc

SEQ ID NO: 1089 - DNA, 52 bp, Homo sapiens
gggctgccacatcttcacggtgtctgcgcgggacgcggacgcgcaggagaac

SEQ ID NO: 1090 - DNA, 72 bp, Homo sapiens
ggcactgctgatgcctcgggtgggtggcatcggtggcgcagtgagcgagctggtgccgcggtcagtgggtgc

SEQ ID NO: 1091 - DNA, 58 bp, Homo sapiens
gctggaccacgaggagctagagctgctgcagtttcaggtgaccgctcgcgatgccggc

SEQ ID NO: 1092 - DNA, 121 bp, Homo sapiens
gctggtggatgtcaacgtatacctgatcattgccatctgcgcggtgtccagccttttggtgctcacgctgctgctgtacaccgcgctgcggtgctctgcgctgcccaccgagggcgcgtgc

SEQ ID NO: 1093 - DNA, 236 bp, Homo sapiens
gagctggtgccgcggtcactgggtgcaggccaagtggtggcgaaggtgcgcgcagttgacgccgactcaggctacaacgcgtggctttcgtatgagctgcagcccccggcaagcagcgctcgcttcccgtttcgcgtggggctgtacacgggcgagatcagcaccactcgtgtcctggacgaagcggactctccgcgccaccggctgctggtgctggtgaaagaccacggtgagcc

SEQ ID NO: 1094 - DNA, 78 bp, Homo sapiens
gcgcgctctggatgagactgactcgccacgccagcgcctactggtgctggtgaaggaccatggcgagccgtcgctgac

SEQ ID NO: 1095 - DNA, 54 bp, Homo sapiens
ggacgctccgcgccaccgcctgctggtgctggtgaaggaccacggtgagcccgc

SEQ ID NO: 1096 - DNA, 85 bp, Homo sapiens
gccatctgtgcggtgtccagcctgctggtgctcacgctgctgctgtacactgcgctgcgttgctcagcgccgcccaccgtgagcc

SEQ ID NO: 1097 - DNA, 704 bp, Homo sapiens
gctgtgaatgatgggaggaaaagtccaactttgtaaatggttttggattcaattaagaatctgtagatttttcagagcatttaggataaaggttagtcctttatcaatatattaagtctctgttatgttttttgtgctatatggattttctaagatttttgctgatttcattttcctacttaagattagacattttctttgattatttgttcatacttggtctccttttatcatgtccattttgatgaatacaactttcaggtttactcattaatgaaaagtaatatttgttcaatttatcaacttttcaaaatcacaggctgttgacttgaagactccagctccattccgtttcattaaagaaagcttttctaaacttttgatgcttagaagacaggaacgatgatatagtgattattagtacatattctattgattctgtcttatgcttacctgtcttgaatttttaaatggagaagcgtctgcaaaaattgcatcgttttatttcacaatagcttgaagtgggaaagactacatttttccccaaacttaaagacttttctgctctttttataaccttcactccataacatatatgagcattattattactattattgagtcagagtttcactcttgtcgcccaggctggagtgcaatggcgcgatctgggctcactgcaacctcgcctccccggttcaagc

SEQ ID NO: 1098 - DNA, 99 bp, Homo sapiens
gggggacgcggaccgaataaatacttttagtgtactgcgactgggcgcggtggctcactcctgtatcccagcactttgggaggccgaggcgggaggatc

SEQ ID NO: 1099 - DNA, 167 bp, Homo sapiens
gagccctgctggacagagacgcgctcaagcagagtctcgtggtggccgtccaggaccacggccagcccccgctctccgccactgtcacgctcaccgtggccgtggccgacaggatctccgacatcctggccgacctgggcagcctcgagccctccgccaaacccaac

SEQ ID NO: 1100 - DNA, 91 bp, Homo sapiens
gaacgacaatgcgcctgtttttacacagcccgagtaccgcataagcattccggagaatacgctcgtgggcacccggatactcacggtgacc

SEQ ID NO: 1101 - DNA, 63 bp, Homo sapiens
gagatcctgtaccccgccctccccacagacggttccactggcgtggagctggcgcctcgctcc

SEQ ID NO: 1102 - DNA, 69 bp, Homo sapiens
gggactatttgcagtggggctgcacacaggcgaggtgcgcaccgcacgggccctgctggacagagacgc

SEQ ID NO: 1103 - DNA, 90 bp, Homo sapiens
gcgcgccctgctggacagagacgcgctcaagcagagcctagtggtggccgtccaggaccacggccagccccctctctccgccactgtcac

SEQ ID NO: 1104 - DNA, 94 bp, Homo sapiens
ggtggacaaagattcaggccagaacgcctggctgtcatacctcctgcttaaggccagcgagccaggactctttgcggttgggctgtacacgggc

SEQ ID NO: 1105 - DNA, 46 bp, Homo sapiens
gagccttcaagctcacgctgcaggcccgcgaccaggactagctcgc

SEQ ID NO: 1106 - DNA, 72 bp, Homo sapiens
gcggttcacgtgatcattcgcggttcacgtgatcattcgcggttcacgaaaatctgctgttctgcagccacc

SEQ ID NO: 1107 - DNA, 66 bp, Homo sapiens
gccaagcagcgaccctgaggcgacagccggagcgcccggcaatggcggcctcgacggcctcccacc

SEQ ID NO: 1108 - DNA, 124 bp, Homo sapiens
gaccggtctccacggccccccgaggcctcaccgatgcgtccaggcaagcccctagctcctacttcttggccttgacgtgcagcgcccggggctgcaccgggtgtaactcgggcctacagggggc

SEQ ID NO: 1109 - DNA, 193 bp, Homo sapiens
ggcagcagggacggagcgggactcaaagggtgcggctgaggcggcggctccagcctagctctctccatggaggttgggggacgccccggcccggattgtgagctcagccgtttgttggcgaccttccccctccccctttcggttaagatccttgcaaggcctttgctacccagaaccctacgtggttcaaaac

SEQ ID NO: 1110 - DNA, 174 bp, Homo sapiens
ggctcgctgcaaactccgcctcccgggttcatgccattctcctgcctcagccttccgagtagctgggactacaggcgcccaccaccacgcccagctaatttttttgtatttttaatagagacggggtttcaccgtgttagacaggatggtctcgatctcctgacctcgtgatcc

SEQ ID NO: 1111 - DNA, 248 bp, Homo sapiens
gcggtgagccgcgatcgcgtcgttgcactccagcctgggcagcaagagagaaactcgaaactccgtctcacaaaaaaaaaaaaaaaaggctgtaaaggatccacctccaggtaaacatttactcttccatgtcacctgctgtgtacattgtctctctaaccctcacaataatcatatgaagtaggtattagtatcccatttcacagatgagaaaactgaagcttagaaaaatgaagtcatttgtcccc

SEQ ID NO: 1112 - DNA, 1182 bp, Homo sapiens
gtctagggcaaaaagcaaaaagttgctgccatctctttaatattggtcctttcacatcaacatggatggcacgtctgtgttaagaggaagatagaactggtacgatgttggaactttgaaagagagtctccttctgacaccatgtgattcctatgacaagacagactctttcattaataaaatctcctaagatgctgccaaccaaatgactgccttgagattcttctgccagcctaatgattcccgagcctaggaatccctgctatgggtgctggtagttgtgaagctggcactaatgggtctcctaggtattacagaaagcaacagcacctagcagaattcctagcctgtaattggtactcaggacaggtcagttcccttctctgccattaatatttacaactatgttaaaataaactatagcacaatacctggtttatctttctaagagcagcttctgcctctggtcgggtaatataagaaacgtaccactcttcatttaatgaattctgaaaatgtaaatttttagaaactgaataaattttacagttacagatgtaagtgaaaagaaaagcctctgagtaatcatttccataaatcaacacctcaattccaggaggtctgaaacatttgttttcttaatttgcattcagagtcatttagctggggctaaatagaagatattttgtgcgaactgctttttatcatgacactggttgcaaaaatgcctgtgaataagagttccttacagtatggaacctcttcaggaaagatacagatacaataatttcttcagtttagcataataacctgcttgattaaaaaaatgggttattgagcagttaagtgacgaatcaaggtcataaacataaaaaacaggattatttttcttgctgtttaatgcaaaacacatgtttgccattgaaagcgtctgaaagaacgccaagggaaaagaacatattgttcatctggatcttctcctttaacttttttttcaaataaataaaataaaacaaagggaagataaaagtacagaagaacattcaatgggagtttctggtgattcttttaccagggaaaaggcaaacaaacaaaaataaaaacatgctctcttacctcttcctccgcgggggatgggggccgaggtttgtttggaagtggcaaggggaagtttctgccttc

SEQ ID NO: 1113 - DNA, 867 bp, Homo sapiens
gcagtggcacaatctcggctcactgcaacctccacttcccaggttcaagcaattcttctgcctcagcctcccaaatagctgggattacaggcacctgctaccacgcctggctaatttttgtatttgtgatagaaacggggtttcaccatattggccaggctggtctcaaactcagacctcaaatgatctcctggtctcagcctccgaaaatgctggggttacaggcatgagccactgcacccagccttgttttttgtttttgtttttagcattgtgattgctgctgctaccattagaatcccttgttatttctcttttgttcctcctgaagatggttggaagctaatagctcttgtgctttatctaagggattcaggaaggctctactgcccacccgcacacctctgactcccagctcaggcagaagaacaggctctggtgaacccctgtggcggtgaggcgccctggtgtagcccacagctgctggggctgaggactttcagccctagggaaggaagatgacaggcacattaatgcattctgcctcctgcaccaaaatgcccacaacttatatgaagctttaacaggcctgggttaaaatctcagctttgtcactcacaagctgtgtggtcctagacaagtcagtttgcatctctgtgcctcagtgtgttcatctggatattgcaaaaaatagatcttcctcatggggtggtttgaaagattaaacctggagcccagtgcacagtaaacactacaatgttattataaatagtaggtgaatttccacatggtaaatattgttcttgttttcctcatagagagaaggaagcaaacctagtaactcaagtagtgagtaacttgatcacc

SEQ ID NO: 1114 - DNA, 352 bp, Homo sapiens
ggttgcctcaccctcctgtacttccctcccctcctcccttctccctctaggcttccttagacgcccctcatcctggtgaccccttgcatgtgcccagtgtccctccaggccccctcggcccacatggagggcactttcccagcccaggcgactccgggacaaatggattttggaaagagcctagccctgcctcctgccagtgccttggagaagacaaagaaacaggggtcagggaggggacagggagggggcaggcaagccctgtcccagcagccttggggcccctggccgggcagggtttccgtgagcggttctccattgctcccaaaaataaccaagtgtgtatctcgtc

SEQ ID NO: 1115 - DNA, 284 bp, Homo sapiens
ggcccatccggctgtacgagcaggtgcggctgcgcctggtggccgtgcgccctggctggagcggcgcgctgcgcttcggcttcaccgcgcacgatccgtcgctcatgagcgcccaggacatccccaagtacgcctgcccggacctggtcacgcggccgggctactgggccaaggcactgcccgagaacctggcgctgcgcgacacggtgctggcctactgggccgaccgccacggccgcgtgttctacagcgtgaacgacggcgagccggtgctcttccactgc

SEQ ID NO: 1116 - DNA, 274 bp, Homo sapiens
gacctaaatgtatatgagaaatgagtcaacctaaagtaaaacagtaagtaaaagattgcagaagacgacattggctatagtgtaatggataaagtctgggaagcactgagaacgctacctccagtggtgagggggggtgtggcggctgcagagctatccatcagtctgcctggtggagcagaggcaatctgaggaggctggcaagtgctgctttgtaagcgaacagatagggatgctgatggatgccactgggattcaatgcagcagtgaactc

SEQ ID NO: 1117 - DNA, 831 bp, Homo sapiens
gcaatccactttttctggttcagagaggagaccaagggaaacagctaacccggttgctaaaacctttttcattttccttcccatatgtgattgtctccatgtccaagggaggctgggctaatcatgaacctggtctcccatttttaaagagaagataaattatgctcagaagagatagcggttcatttctcaccgaccacttgattcccttgtcttacattaaatgttctatttctgttatctctaatgctgtttgttttccatatagaaggttcagttacaccattacatttccaaaacttttcttaaaaaactcatttttaaaaaacgaagcaacttacccatttatatatggtccccctccccccaagaaacacacatagttttgacaaaggtacctttttcaaagatgaaacaaagtatgtctttccatacatagatatgtgtgtgtgtgtgtgtgtgtgtgtgtgtatatgtatgtatatatagatttttttaaagctaagtgctttcagttgagaggggaggcccgaaaggaaaaaacctagagagatgacgggggagatgggttttttttagtattattttaatgtaactttcttttgctaatccgctcctctctctgttctctaggacatatgagccctaccacctgcaccctgaggaaacacaagaccaatcggaagccgcgcacgccctttaccacatcccagctcctcgccctggagcgcaagttccgtcagaaacagtacctctccattgcagagcgtgcagagttctccagctctctgaacctcacagagacccaggtcaaaatctggttccagaacc

SEQ ID NO: 1118 - DNA, 392 bp, Homo sapiens
ggtcagagatgagggtccaggtggaggatgtcgagggacctggctcaacctcagggttccgctcaactcaaagttgggacgaggccctggcaggaaaagctctagaacctgtcaggccctgcaaagctgaaggatgcgtccaacaggaccagatctttgttgttcctgccacagggaggctcgttccatcccttccccatctaacaaaactcctatgcatccttgatacccagctttcaatgtcacctccctgttgacacagccagggagccagtgtaactgtcagctcaacacctagttccttcctgccaacagcggcaagaaccatttcctctgtgctgcacttcacaagcctgggccctgcttctcaaaaggagcccgcatgggagacc

SEQ ID NO: 1119 - DNA, 298 bp, Homo sapiens
gtgaagcgggcagaggccgtcttggctcccaggggcttgccttctaatgaggccaaagccaggtgcttttccttccctcttgggctccacactgggtctggctcaggcacgggccctcaggaaatgtaggtggggaggccagtgattcgggaggaaaatggaccccccctgccctcggggagaggtgctgctttcagtacggtcctgcctccatctggctgggtgaccttcacttagtcacaaaccctctctaggctcccaggttcctcatctgtcaaatgaggaggctgcagcagcc

SEQ ID NO: 1120 - DNA, 89 bp, Homo sapiens
gatgggtgccccgctcccgcctgggagcagatgaaggtctgcctcacccccgttcgttgaagtcgggcgccggctgattctccatgccc

SEQ ID NO: 1121 - DNA, 129 bp, Homo sapiens
gtgggaggaaaccgggatggggatcagcagcctggaggccgcctccgctggaaccgcgcccgccccgccaggaggctctgcctgctgggcaaggcgcactcagccagccccgcaggccgccacgcgacc

SEQ ID NO: 1122 - DNA, 439 bp, Homo sapiens
gcgagagatggagctgcccacggtgttggtgacgcccacggtgagagcgccgcggtccttacagtagcgcagcgccaggagggtgtccgcggtctcgcctgccgcccaggggccctctcagtgccgcgctccgccagcctcggccccaccccaaaccccttcctccttcaccgccggctcttacagggaaatcggcgcccgagacacagccagcgggtgttcagaaaggaaaacgctcgctcaacagccttttcggttgattcttacattcaaggtgtgttactatttgtggcaagcatcttttcatttaaatctcgtgacaaccccgtgaggaccatcgtccccattttcctcttgaggatgagggctcagagacaggaggaaaccggtgctctgatcaaagccatacagctggtgacaggtgggcttggctcccagc

SEQ ID NO: 1123 - DNA, 320 bp, Homo sapiens
gagggtgcaggctgcagagatgcccgggtcctgcaggtaagaaggcagctgcagcgcctaggagggcagacgcagccacacccctgaaggcagaccctgtctgctcccagccctcccccaagagcacagagggggctcggatccacaggtgcagtttgggctgctatggccccggccctcccgcctgctccgtacaacaggaggcctgggtctgcgtctgcagtttgggcgcctggagctccagtcccaactcagaagggacagggctcccaccagctccctggagcgtgcagctccagccgtgcctccctgctgtagcc

SEQ ID NO: 1124 - DNA, 159 bp, Homo sapiens
gagaccatcctggctaacatggtgaaaccccgtctctactaaaaatacaaaaaattagccgggcgaggtggcggcgcctgtagtcccagctactcgggaggctgaggcaggataatggcatgaacccgggaggcggagcttgcagtgagctgagatccc

SEQ ID NO: 1125 - DNA, 195 bp, Homo sapiens
gggtgttggtgtcgaagcggcaggggtggttgggcaggtcctgggcccgctcgccgaggcgcacgcccttaagatccagagagaggatgaggcgcgggttggccgtgtcgggatccaaggtgagctccactgcagacagagacagggagaaatgtccccacgcagccaggcccctggcacagtctttgcagggcc

SEQ ID NO: 1126 - DNA, 241 bp, Homo sapiens
ggtgtcttacccacctgccccctcccttgatccagactcactgaggtcacagcctccacctctggccatcctgaacccctcccaaagtcaactcttcacaaacactgttggtcccccttagaaggccccatgtccatcacggcattaattccactcaccctcaaacaccgcggcccggaggctctgattcccaccctggaggaggttctcttgaccccgccggcgcgaccctccccagcac

SEQ ID NO: 1127 - DNA, 1513 bp, Homo sapiens
gggggaaactgctgtatagaagaggtcaaacaagctgagtgcaggttttgtcacgaaactggggggcgagtagggttctattatcaaagaatggttgtgttggggccataagaaagaattacaggcagtggtgcgcaggtaatgttcacgagacgccacagcggggtagcatcagaggcgggaggaggagggttggagagcagggccgtgttgcaaggctctctgggtggccacagcagcttgcgctgcgcccacattgcttctgcgtgtttacagttgggcacgagaaggctcagcacgcacgcacagcaggtgggggcccgccctgcccacagcgtgaaaacaggagccccggccagccacggctgggcagggccagaagcgcctcctccaggatcctccccgcgctggcccgccccacaggagcaccgcccctaccaggagcccggagctcttcccagggcccgcctccccgccagggggcgatccacctccacttcctgtttccgcagccgccctaccaggagcctggcactctcctcagggcccgcctccccgccagggggcgcaccgcctccacttcctgtgtccacggctgtcgcgagagcccggggcgagtgggcctctgctcgtgggtggttctcgtggaggtcagctcccgcgtgtctccgctcgacagggtgcttgggcaggtaagggtccgctcagtagcccaaccctctctgtatgcagctccccaaattcagcgctgcgctcaggcatggcagccacccgttacgtggggccgttcgcatttgcatttattgaggtcaaataaaatgctggaaattggtgcctggtgacactgtcaggttggtggttaccctagcaggtcggcccagcccctgaacgcttccatcactgccgaaagccctgtgaggaggcgcagagctgagcattccccgccgttgcgtgggcccccctctacctgccgcgtttttcctctttgctgcagagcccatcgggtaggcgcgggccatggcgcagtacaagggcaccatgcgcgaggcaggccgtgccatgcacctcctcaagaagcgcgaaaggcagcgggagcagatggaggtgctgaagcagcgcatcgccgaggagaccatcctcaagtcgcaggtggacaagaggttctcggcgcattacgacgccgtggaggccgagctgaagtccagcacggtgggcctggtgaccctgaacgacatgaaggcccggcaggaggccctggtcagggagcgcgagcggcagctggccaagcgccagcacctggaggagcagcggctgcagcaggagcggcagcgggagcaggagcagcggcgcgagcgcaagcgtaagatctcctgcctgtcctttgcactagacgacctcgatgaccaggccgacgcggccgaggccaggcgcgccggaaacctgggcaagaaccccgacgtggacaccagcttcctgccagaccgcgaccgcgaggaggaggagaaccggctcc

SEQ ID NO: 1128 - DNA, 415 bp, Homo sapiens
gcagagcgtgggatgcgggagaaaaacctgctgccgttgctaatggccccagtgttcttccctcgcaggcagaaattatgcaggcttctgtctcgcggcttctccctttacccagcgccttgtatgtactgggagaccagactgtgaccacctccagggtgacaggaagcagcaaaaaataaaaacaaaaaatgacagaaagacatgcattgtattttccagcctgttgaagcttcctttactgcatactcttggaaaaaaaaaaaaaaactgtcttgccagtgatttacacatgactggaacattttaaaacctaggcaacacacacgtatttatctgattgatgcttctctaattctttgaagtcctcaggccatctaggaagttatgtcaatttataattttccagtgaccc

SEQ ID NO: 1129 - DNA, 248 bp, Homo sapiens
gtcccagaagcccagcgggcttcacctctcgctgggagttgggtgggactttttggcaactagcctgggcactccgggagctcctcccacacaaccaagaggaaaagaggaggagagagacagagacccgccatcgtggccaacgaccccgccaagagggaacggcggtccacgcactggacccagcctccgatcaagcccagcaggggccggcaggtcgcgccaagtgcggggcccaccgagcctgc

SEQ ID NO: 1130 - DNA, 135 bp, Homo sapiens
gcactaggagcagccggccggccctgccggccccgccggggtgtgaggggcttagcactcgggccagcacctgcggagggtgcactgggtcccccagcagtgctggcccaccggcactgcgctcgacttctcgcc

SEQ ID NO: 1131 - DNA, 133 bp, Homo sapiens
ggggtgaattcacgccattcgcctgcctcagcctccagactagctgggactacaggcgcccgccactacgccgggctaattttttgtatttttagtagagacggggtttcaccgggttagccaggatggtctc

SEQ ID NO: 1132 - DNA, 117 bp, Homo sapiens
gcaggagcccacggcggcgggggggaggctcggacatggcaggctgcaggtcccgagccctgccccgcagggaggcggttgaggcccggccaaaattcgaggcagcgccggcgggcc

SEQ ID NO: 1133 - DNA, 372 bp, Homo sapiens
ggctggacgtcaagacaaacacattggcagaggaacacacaagcacctggatgtggagagggtgtcgagagcacgctgacaggtaccggcaagcctgcaggccatcgaccgaccggccgaacgacttggagtttggtcagggcggttggaggagagccggggctgctgagcggcaggaatccaggggaaaacctttccactccatccctcatctgctgaaaactacctccactcaataaaaccttgcactcattctctaagcccaggtgtaatctgattcttccaatacaccaaggcaagaacccgggatacagaaagccctctgtccttacgacaaagaagaggatctaattgagctggttaacataagcc

SEQ ID NO: 1134 - DNA, 197 bp, Homo sapiens
ggctttcctgttcaaatgcacttttgttttggggttttttggtctgtttgttttttgagacgaagtctcactctgtcgtccagtctggagtgtgcagtggcgcgatctcggctcactgcaacttccatctcccgggttcaagtgattctcgtgcctcagcctcctgagtagctggaatcacaggcgcgcaccaccac

SEQ ID NO: 1135 - DNA, 426 bp, Homo sapiens
ggggtttcgccgtgctggccgggctggtctccagctcctgaccgcgagtgatctgccagcctcggcctcccgaggtgccgggattgcagacggagtctcgctcactcagtgctcagtgttgcccaggctggactgcagtggcgtgatctcggctcgctacaacctccacctcccagccgcctgtcttggcctcccaaagtgccgagtttgcagcctctgcccggccgccaccccgtctaggaagtgaggagcgtctctgcctggccgcccatcgtctgggatgtgaggagcccctctgcccggccgcccagtctgggaagtgcggagcgcctcttccctgccgtcatcccgtctaggaagtgaggagcgtctctgcccggccgcccatcgtctgggatgtggggagcgcctctgccccgccgcccc

SEQ ID NO: 1136 - DNA, 184 bp, Homo sapiens
gccgagatattgtttgtatttttagtagagatggggttttgccctgcaggccaggctggtctcaaacttctgacctcaggtgatcagcctgcctcggcctcccaaagtgctaagactacaggcgtgagcaaccgcgccaggctaatttttgtatttttagtagagacagggtttcgccatgttc

SEQ ID NO: 1137 - DNA, 174 bp, Homo sapiens
ggggcggctggcctggcggggggctgacccccccacctccctccaggacggggtggctgccgggcggagacgctccttacttcccagacggggtggctgccgggtggagaggctcctcacttctcagacggggcggctgccgggcagagaggctcctcacttctcatacggggc

SEQ ID NO: 1138 - DNA, 186 bp, Homo sapiens
ggctcaatggggtgggaagttacccggaacgcaatttctcctcctccggcctgaagtcaggttggcggtaggattgccagataagatacaaaatacccaattaaatttgaatttcagataaaggaagaacaacattttgcatacaaatcaagcaacactacctggtgaggccgggcgtccgtgagc

SEQ ID NO: 1139 - DNA, 581 bp, Homo sapiens
gggctgcagggcgagcagggccacgcagcggtggtggcagagttgaggacagagcccgggtaggcgaggcatggcgcgtcaggtgagataaagccaggcaagccaatgggagggaccgcgtgagtgggttgaggccaagcggcgcgagctccagagctggtgaggcagctggtttgcgctggagccccagccacgaggaggcccctgcccaacccttccgcctcaaaactaactcttaagatgatcctcgtggctgagagagggtagaatcatcttcaactgtgctccaaataactgtatttctggttacaaatcatgtaccttcagtcataacaatgtaaacccaattttgttaatgagtggtaagatttaaaggtgttctaaagcagttagcagttacaggattttgatagttggagaaagtttggcactatgaaagtgtgccgtgttaaatacatctgacctttaaagccaccgacctatttccaagtatttgaagacgtcaggaagttctacccaagcctaaacaaagaggagtaaccaaccagtatgctaaagtggaaacgccagggatcgaaacc

SEQ ID NO: 1140 - DNA, 290 bp, Homo sapiens
gatctcctgacctcgtgatccacccgcctcggcttcccaaagtgctgggattacaggagtgagccaccgcgtccggccgcaaatgagttttcaaagttcacattggcaagctccgcattccttaagaaacgcggtttgggttatccaagttcttccaatcactcacccaaacagacatgagatctgcttctcccaaatcaatggaggtccataatgagaggatggattggctgaaggaaaaatggaggtaccagggattgaaccagggacctcgtacatgcgaagcatgc

SEQ ID NO: 1141 - DNA, 141 bp, Homo sapiens
gggcacggtggttcacgcctgtaatcccagcactttgggaggccgaggcgggcggatcacctgaggtcaggagtttgagaccaacctggccaacatgatgaaacctcgtctctactaaaaaaacacaaaaattagccgggc

SEQ ID NO: 1142 - DNA, 147 bp, Homo sapiens
ggcgcccgccaccacgcccggctaattttttgtatttttagtagagacggggtttcaccgtgttagccaggatggtctcgatctcctgacctggtgatccgcccgcctcggcctcccaaagtgctgagattacaggcgtgagctacc

SEQ ID NO: 1143 - DNA, 245 bp, Homo sapiens
gcaattccactcagttcccctagggacttgttttgttacgaccctgtagcggttgccgccagcctcccgtccccggacagcgcgcctctttcctccgcgcggaatctcgccttgccgagaggtgacagcgtggtgccaggcctcgctcgctctccgcgcctcctcggcctcggcgcccactctggccgcgctcgaggagcccttcagcttgccgctgcactgtgggaacccctctctgggctggc

SEQ ID NO: 1144 - DNA, 90 bp, Homo sapiens
gcgactccccgccgccgctctactcacctgacgcgcgcagtggaccgcgatttaggggcacagggtctcccggggaccagcggctggagc

SEQ ID NO: 1145 - DNA, 609 bp, Homo sapiens
gcagttgacttgtggattttatcggttttagtccctgtgtgaccgccagaagtctgcagctttatccttgatgagttctgaaggcccctgaggagagctgagcccaagagactttttaattccacggaggtacttcgcctgaggcaggtctcttctgtgcccagggaaggaaggctgggagtgagggtatctgaaaatattcacatgagaaaaggtcaagtccatttttgctatcctgtactgaacacagatcaattaactggtcccaggattgatagcaacaggcctataactggtctcctggttcctatccagcccttcccccataaaggcagaatcctgtcttcttggaacagtgaatccccagcagaggacctcagcctgggctgcctggaacctgctaccctgcccaggagctgtcaacacctggagcgcagtgcaggaagaatgcaggggcgcttggtggggaggtgagtgagtgcagagggtctccgggaactccttgggcctttggggtagctccctctcagactgtcctgcaggtccttacaaggcccactactgagcaggaagaatgtccccaggagaggcaaagggtggggcaaaggc

SEQ ID NO: 1146 - DNA, 347 bp, Homo sapiens
gttttctgacttggagtacagtgctccgctctcacgttatctgtcagctgacgctgcagccagcctcatactcaacacatcacatggttcgaaggctaggccactttccactactattgagctgcctcctctctatgaaaatgcttttctggattgagggagacagtcatagagaaatgtgttgttggcatcgatttcctatggttgggcaatggcttccgccatctggaccaggtgacgtcagctatctggatttctgccagcattccccggcccaggaaacagacttccggctgtctgggctctgagccatcttcggcctcctgggtgagtgggtcttgcaattc

SEQ ID NO: 1147 - DNA, 283 bp, Homo sapiens
ggcccctttccaaacactcctgatgcctcatttgcctctcgcctcttttcgaccaccattttgggggctgaggcactcacggggcctccccaggtttcactccgtttctacacagtcggagccccatggatctcccatctcccggaggaaccgtgaagccaaacagaagcgcctgcgagagaagcaggcgactctggaggctgagatagcaggggagagcaaggttaggggtcagacagcttgtccttgggtttctgagacttgagaggggctggaggagacc

SEQ ID NO: 1148 - DNA, 291 bp, Homo sapiens
ggcctcggtgttccaggagccagcacagcaggtggtccagcctttcctggacctcctcgtcccggggctggtatcgatccgggtatccgtctctgaggtcaaagttggggcctggaccgttagtggggggtgggctatagtagcgcagggctcgggcatctccatggtactggcgttgagcatccagggagaagcagcccagttccgaagggcgccggtagaaaggaaagggcccagagtagagggcagggtctgtgggcagagaaggtgctggacgaggtagtttgttcc

SEQ ID NO: 1149 - DNA, 71 bp, Homo sapiens
gaggcggcgggggggggcggggcggggggagggggcggggcggcggggggatcacttgaggtcaggggttc

SEQ ID NO: 1150 - DNA, 171 bp, Homo sapiens
gtagttgtgtctgcacaccttgtccaccgcggcccgctcctgctccaagaagtccttatagttgttccagtcctcgatgctccgccccagctcggtcaccgcctggaactccccaacgtcgctgtcgaagcgcccgtactcctcgcggttatagatgtatctggccacacc

SEQ ID NO: 1151 - DNA, 366 bp, Homo sapiens
gcccgccttggcctcccaaagtgctgggattacaggtgtgagccactgcacccggccggtttgaaccttttataacaagagtgaatccagatatttactatgtaattttctcatttagtctaatcatttagactaaatgattagaagaagcaggacttaaaaagaaatgaatgaatttccactagggggtggtagagaatcataatccatatcatagtctgaaactgaagggcaaaaggaaatagtcaagttcagaatcacatgctgcagcccatttgtaattataaatctttattaactagctcagtgtgagatctaatttcttcataaatgcccaataatatataatatgctcttttgagcaac

SEQ ID NO: 1152 - DNA, 184 bp, Homo sapiens
ggcctcacacctccctactgctttctgtttgcaacaggatgcccttttcagtatttactgctatttttggcttcctcccaggagctcctacaacaaaagggagcctgagtatcttgccaggagacaccagacccgtgccagaggggcgggggctcccgtggcaatgcaggaagcaccttgtgcc

SEQ ID NO: 1153 - DNA, 295 bp, Homo sapiens
ggaaggcgggcggtggagcctggcggtgccgtgtccctccctgcaggagctcaaggagtcttgcatccggaaccaggactgcgagactggctgctgccaacgtgctccagacaattgcgagtcgcactgcgcggagaaggggtccgagggcagtctgtgtcaaacgcaggtgggtatcgccgcccggggggagccagaggggatccaggggaagtgggagccagggcgggcccagattcctggggaggaaagaagggtaggtgggcggaaatgccctggagcctggaattccccc

SEQ ID NO: 1154 - DNA, 780 bp, Homo sapiens
ggggactctggccagggacagagcctcccatcacctgacaggaggcacagggagccctcctttcaaggacaggattctggctgggacagcagcacaggagctcacagtgccgagtggcctgcgaggtcacactgttcatctgtggggaggcagctgcctccaaagcagtacaaaagcaagagaagggtttcactcagtggctgtaggtctgaatggcacacaggaagaagccctgagcagtcaaacagtaactgaagcttcaagttgggaggacgcacagacgcacagtcccaggctgaccttatctctgaagtcacgggtgttttggaattagccgtgcaaggaccagaggggctcttgctgggaaggccagtcaagatgtggaccccctccttcctgacataatttctactggaaagatctctgcaactccttgtcccacttccccatgccctcctctcaaacgctctctctcccacgcagttatctgatatttgaaatgtgcagaatagtttttttggttcaatggttctcaactgggggtgcacatcagaatcacttaaggagcttgtaaaagcacacagacagctgggccctactccagacctactgagttaaaatttgtcaatagggtcccctggtgattccaatgctcaccccttgttaagaaacactgcttatggcttcaagcccagtttcaatgcaagtactctgtgcagaagttactgagaatacaggccctacagaagtttagataggatggtgtgtaggagccagcac

SEQ ID NO: 1155 - DNA, 294 bp, Homo sapiens
gtttcctatcgctgccagtcttccatcagcggctttaaacaatgtgagtttcctgtcttactgcagttctgcaggtcagaggcccatcacgcgtctcatggggctacgctgaagtgttggcagagtgcctgcctttctggggcctagctccctctctctaccctctaaggtggccaagaagggtacagtcccccacttgctgcctgcctctgccctctgctaggctgtcatactctctctctgatctctgccagaaaacgctctccacttttttttttttttcttttttgagac

SEQ ID NO: 1156 - DNA, 216 bp, Homo sapiens
gccggtgtgcgagccacggcccagcagccccgactattcatgggcatgatcctgatcctcatcttccccgaggtgctcggcctgtacggtctcgtcgttgccctcatcctctccacagagtagcccctctccgagcccaccagccaccgaatatgatgtaaaaaccacccctcctcattccagaacgaagagcctgacacacacgcacgggaccgc

SEQ ID NO: 1157 - DNA, 358 bp, Homo sapiens
gattcttctgcctcagcctcccgagtagctgggattacaggcgtgcactaccacgcccagctaattttgtatttttagtagagatgaggtatcgccatgttggccaggctggtctcaaactcctggcctccagtgattttcccccgccccccggctcggcctcccaccgagcctggcctaataaacacttttttaaattttatcattttaattaaatatttcagactttagataggaaagggaatgagataatttttgttcgtttttccaggttgctgaacaaaataattaccagaaagaaatcaacatttagctttaatttttgatgctacaagacccctctggagacagtgttcac

SEQ ID NO: 1158 - DNA, 405 bp, Homo sapiens
gggtgtggtttgcttcttcagtgccccgctgctcaaacctctaggggagcttacagacgggcaggctgtggggctccaagcccatggtagtgtctaggggtgaatgtttaggcctcctgaagccccagtgggcgtgtgttacagggcgctctcttagtttgcagtctataggcggcttgtgttaaccagctcaattagactctttaccttgttgcaagtacagagggctttccgtatcctgggatttcttcgctgtgctcttttgccggcgctcgtcaaaaagtcctctccatgaccagccacttgcatcttcttcccctatgaattcctcacgaagtccagccacttgtgcgtgtgtgccttctagggcctggagtttttacaggcacaggacgggggaatggc

SEQ ID NO: 1159 - DNA, 462 bp, Homo sapiens
gccgaggtaggggcaggtgctgagaattccagtttgcaaagcctcttatcaagagacttattgtgaggaaaatgggatgcatcatttgccctttcagtgggaggttcttcctctgggtgagtctaatttgctgaaagaacaatcgtgtccttcagattgtattatatgtgttcagtggttcttcagtttttcatcccagtctaggagagttcatctatcatactaaagactatttatggtataattagccccttgtccaatttttcaaattttctaaaatggttttcagttagaaaagttagataagcttgagataaccagattgaattgatataagcaaagcaaagcaaaacaaacaaaaagcaaaacaaagcaaatttttaaaaaattaaggtttagcgaataggaacagctccggtctacagctcccagcgtgagcgacgcagaagacgggtgatttcc

SEQ ID NO: 1160 - DNA, 291 bp, Homo sapiens
gtgcccggggctgcacactttatggagctgcacgctttatggagctgcatgctttatggagccggcaggagcccggaacagatgggagaccctaccccttccgagttggtggggcaggagccccatgctcctgggcactgctgcaaccagccagctgcagctgcggacccaagtatccctgctgcccccgcaggttccgcagtgcctgcttccggctgcctggcctctccccactcccggtgcctgctccgattttggagcaaggttatggctgagcccgggtgctgtcac

SEQ ID NO: 1161 - DNA, 631 bp, Homo sapiens
gttttcttcatgcctgggcaaactcttagttccccactgttggagatctgccatcatgccagcgtggctgggcactgtctggccctgcaaccccacagtgccctgaggtttggtgaatttgatggggagatagaccatgtccggggcctatctctactgatgacttcagccaggccatccatcatttgaggtttttctgactcttgggaagctgttgaaacactgggctgcatagcactaacagaagacagatcgctaactcctcagagagtgcggcctcctgcacactggctgccttaacactacaggaactaccatgcttagggggtggccagtgtcctgacctcctcccaactactgccagccactattctctagttttgcttccctttttcattgtatcaccttctgccagctccccgtcaagctgtgctgtgctttggttgcttcctggccggtgaggctgtcatctggaatcctccccagtatctgacccggttaatttgcaggagcaagaacccgatgtcaagccatatagaaaccaagatttcttcccctatttcccagggctacagccagcaggagcacacaccatatgcatggagcttcctttacttctaggggaggtggc

SEQ ID NO: 1162 - DNA, 211 bp, Homo sapiens
ggttcacctgggcgccctgcttcagcaggtagcgggcgatctctcggtggcccttgtagcacaagatcatgaggcacatgtggccgtgccggttggccacctccgggtaggtctggttctcgccagtggccatggaagcaggcggcgctcaggggcgtggagttggtgctcctggtgcggttcgccgaggccctgtgaggcagcaggctcc

SEQ ID NO: 1163 - DNA, 214 bp, Homo sapiens
gggcggcagccttcaccgtctcccccgccgccacctgaggggttcccgtatcatttcgtctatacatatttactgtatatatctcttagagaaccaaatcctttaaaaataatcaaaatattatcacatctaaaaatatagtttttaaaaaatatcaagcgtccattgttcacatttcctaaattgtcttacacattgtttatccagtgtgtac

SEQ ID NO: 1164 - DNA, 289 bp, Homo sapiens
gcccctcccccagcctcgctgctgccttgcagtttgatctcagactgctgtgctagcaatcagcgagactccatgggcgtaggaccctccaagccaggtgcaggatataatctcatggttcaccgttttttaagcccgtcggaaaagcgcagtattccggtgggagtgacccgattttccaggtgccgtccgtcacccctttctgtgactcggaaagggaactccctgaccccttgcgcttcccaagtgaggcaatgcctcgccctgcttcggctcgcgcagggtgcgc

SEQ ID NO: 1165 - DNA, 1884 bp, Homo sapiens
gtctgtgttttacaaattctgatcatccatttaaatgactttacgacccactaaaatggacttcaaattctgaaaaacattgttcttaaggatgaatacccaggcgtgcaactgctggatcaggaaacacggacatcggacgtcgtcaacttttccagatccttaactgttaaatgttcttatctaagcgcatataaatttaccactatttaacttcagagcgaaaagcgtgaaacatcagagaacattttatcttttccctcggtcattaaacagtattaatcacttaccatgtgctaagtaagcaatctctgagcccagcgagaccggtgggttaatacgcggaggggctgcgggggaggacttaggggaccaggacctcagtgaggccccagaaagcacccgggaggggcctccgatcctgcctgggagggaggggttagaggaggattcctggaagaaggaggacctaagctgggtgtttctatttttgatttttattggtttcctaaaacatgaaagtaacacatttgatgagaaaaaatattcaaaattacaggagtatattcagtaaaaggtagaaatccccattccgccctgaaagttggatgcggagactaacagaagtcgcattatcagctgtcccgatctaggaaatttttaggaccccacgtttttaaatacttttaagagtatgtctgatacagtctgtaatactaaagcatcaaaataatcatattttccataagagacgaaagtgcaaacagttactgtctagtcccattattacttggaacagactttttcttcttttccttgttctgtttttttcctggcccgttggcgaggttagagcgccaggttgtaagaatcgggtctgtggacctcataccagataggcgcgaacgcctctggcagcggcgtccagggggtccggcggcactcgcggtggggctgcctgggttgcgggtgacgatctgcggggtcccgcacccggccccgcggagcccggacccgcacgtaggcggcgcggcaaaggcacaccctcctcgcggccgcgaacccagcgccgtcctcgcagcgcggcaatgcacggccaccgctgcccccagcccgcccgccgcagccgcgagcacccaaacacctaccctgcggggcgacgacccccggagctcaggcgaggccgctcgggcgtgccacctccgcggccatgacggcgacccggggaagcgccccgcgcgccaaggccccgcgctgctgagctgtgagcacggctgccccgtccgtccgtccgtccagcacccgcccggagagtgaggccagagcacgccccagccgtgtctaaatcaaggctcggggcggtaccgacgggctgaatgacaaatggcagatgccgtgggctttgccgcccgcggcagccaagaggatggctgcgccgaggaggccgcgcgcaggcggggctcgggagccggaacggcgcggccgcgaggagggcgctggggcccctggcgggggcgtcacgtggcaggaggaggccccgccggggagctgggggtcggcggccgaggcggggggagctgagcggcacccacacgtcctgcgggccgggtcaccggtgggggcaaagccaaggtcgcccaggtacagcgctggcgcaggtagacccgagccggcctggggtctgcagcggggcctgctagccgaagtctccgccaggatgggccgccagagcccaatcacacatgagaaacgcgacagatgctgggacgctgcaataggccaaactaacttacctcctgtgccagcagcgcccaagtgcagctgcccaaacgtgagcactgaccgtgagccaggcactgtcctaagcactttgcaggtaaatac

SEQ ID NO: 1166 - DNA, 119 bp, Homo sapiens
gcactcggcagtggcgcgcatttcgcgggcgcagtacaacgcgctcaccctcaccttccagcgcgccatgcacgactacaaccaggccgagatgaagcagcgcgacaactgcaagatcc

SEQ ID NO: 1167 - DNA, 159 bp, Homo sapiens
gatgccataatctcttaagtaccggcgcctcatggtaccgcggcgcctcagcccagcctccgcgctgacaatcagcgcccggcagcctagagcgtccctcggcttctgggccgagtcccactcagggccattcaaacgcggccgcgcgcgcggcctgcc

SEQ ID NO: 1168 - DNA, 363 bp, Homo sapiens
ggtggctcacgcctgtaatcccaccactttgggaggctgagttgggcagatcacgatgtcaagagatccaggccaacatcacgaaaccccgtcctactaataatacaaaaactagccaggcatgatggcatgtggctgtagtcccagctactcaggaggctgaggcaggagaatcatttgaacccgggagacggggttgcactgagccgagatcatgccgctgcactacagcctggtgacagagcgagtctctaactcaaaaacaaaacaaaacaaaacaaaaacacacattgattttcttaaattctcctatggttctggagctcagaagtctgaatggtctttcgaggctaacatcactgc

SEQ ID NO: 1169 - DNA, 1011 bp, Homo sapiens
gatggaggagcaataacagatggaggcaggcaggggaaccacaatatctcattagttaggagaacacggcgttggaggaaattgcccgtgtgcggtgctgaatccctgagaggaccggaactcaagccaaaagaagctaagagagctaaatgagtgatagggtgacaggactgaaaacaggaagagtaattcaaagtctgtaagaactcagcccctcccatacccctctttcaaatctctctgtccgcccagcctctgcacagcaaacacacacaattccaaccccgggcagcataccgaggattcgtctctacacatagtgaaatcatgcagagaatacaggcattgtatgtggatatgagcactccacagtcagaactccacattctggcaataagagcctcatctagcatgtgctggatgatggatgatgtgcttttttttttttttttttttttgagacagagtcttgctctgtcacccaggctggagtgcagtggcattaattatctcggctcactgcaacctccgcctccagggttcaagtgattctcctgcctcagcctcctgagtagccaggattacagatatgtgccaccacacccagctatgttttgtatttttagtagagacagtgtttcaccatgccggccagactggtctcaaactcctgacctcaggtgatctgtgcaccttggcctcccaaagtgatgggattacaggcatgagtcaccacgcctggcctagatatgcttctaatcagtatccttagagacagtcctgaagatattgtatccattaaaaagaacaggatgctaagaaagatagataatctgaaaacaagaaagaccccttggatattgcaaatataattgttaaataaagattttgataggttgggtgataaattcaagtgaaattttcaggaaatattatttgatgacatagtcaaagaaataacataaaggatccccctgaagtccaagaatatttagattaaaaagtctcatc

SEQ ID NO: 1170 - DNA, 209 bp, Homo sapiens
gcggttctctgcggcctctcgccggtgtcgcccttggccactgggctgcgaggaagccggcgaggagtgggtgtgcgccccgcccggctctaccggcgagggatgcagtggccgccagcgtggccgtgcggctgggtcactcccttcccgcttccagggcctttttctgcctccttttcaggacgtgacccgcacattatgagggaccc

SEQ ID NO: 1171 - DNA, 400 bp, Homo sapiens
gcctgctgcgccccacgcgcctcccccctcgcgcctccccccttcgcgcctccctgtaccctgcataccccgtgagcctgctgcgccccatgcgccttccgcgtctccagccctcatgcgcctccagctgcgcatctccctaggcgggtacctcagcaccgctgagcccacccccgcccctgctcagtgcctcccagacacgcccactgcgggcgggacagtgggagctgtccaggcgcggagctgtccaggcgcgggagctgtccaggcgcgggagctgtccacgaggcactgaccttggtttcagagcctctgcagggcttctgtgtccttttggctgagccgactgggcaaaagttttagaaaagaccctgggtgttgcagatggagaaggatgatc

SEQ ID NO: 1172 - DNA, 426 bp, Homo sapiens
ggagagcattcagacgcccttcagctggacattcagctttttcttcttcttctttttcttcttcttctttttcttcttcttcttcttcttcttttttttttttttttttttttttttgcctgcttggctgcaaaagtccagaggaagtgaatccacacttgctgatgacctcatttccaccgcttcccagcaaccccgccagcctctcagggggaggcttattcagccagccactggggactgcagggaatggagactggggagagcaggcctgcagctgcaccccaattccactccgccaacccctactcccacctctcccatcacgggttgcagctggcctcgtcattcttaagaaaagggactcaggtgatagtcagaccgagtgatgagggatctaagcagacaggatccagccgacaggcc

SEQ ID NO: 1173 - DNA, 393 bp, Homo sapiens
gtaggaggaaggtgaatgaaaatggttgcttatttctttaggtggcgctgggtcagtgaatgcacaccaagggtgcgaggatgtcatcaccctgtattacccctccagatgatgcctccgccccagagacacaggcacgtgcacatgcatgcacgttctctctacaagcttttcccgggctaactcggaatatgtcctctctggctaacataaacatttgctttgttttcctgatcaaaactgaattcccatgtttccagaacatcagcccctttcttgctttcacttgccatggagccctgccttggttctgccagaagcgtccagggctccgtgtgattggcagctgctgagtacaggcggcaggttcagagtcagacccaggacactggc

SEQ ID NO: 1174 - DNA, 1004 bp, Homo sapiens
gattccctgagccccccgtgcacctttcctgcccctgcccgtggccttctgcaccctcatctaacgagatttggaaggagggctccagacccgggtgggggcattattctgtgctcccccaacccccactggcctccaccctggcacaggccgccttaccatgtgtttctcctctcaggaacggcgacaaaaccattgtgctcagcaacgggcagaaagaaatccacacagcccggttcaagaggagggagtacccggatggcaccgtcaagactgtgtattgcagcggctgtcaggaaaccaagtatgcctccgggagggttaagatcaaagatgaagctggaaatgtcgtcctggacgagaagcagatgagccctcaacacgcagcatcacatgggaaatgccaattgcagatttttgctaaaacagacaaaaactaataacatattagctgccctaaatgatcttggagagccaccaaaactttaggactacccaagtcatctagaaattgcaaaggaaaagacattctctcccctatttaggaaacttggttagagcagcacacgtcagagaacagaaggctcacaaaagaacgatttcttgtcttctgctagcttttgaatattttgctcttgcttctctagttcttttaattgtgatgttagggtgtcaattttagatccttcctgctttctgatgtgggcatttagtattataaatttttctcataacactgctttagctgtgtcccatatattctggtacattgtctctttgttctcatttgtttcaaagaactttgttatttctgccttaatttcattatttacccagtagtcatttaggaccacgttgttcaatttccatgtagttgtgaggttttgagtgagtttcttaatcctgagttctaatttgattgcactgtggtttgagaggttgtttgctatgatttcagttcttttgcatttgctaaaaagtgttttacttccaattatgcagtc

SEQ ID NO: 1175 - DNA, 1432 bp, Homo sapiens
ggagcaggcacacgcctcacaagacactcatgccctacgcgtccctcttccagtcgcactcctgcaagaccaagacctccccgtgtgtcctgtcagaccgtggcaaagctccagatccccaagcaggcaactttgttcttgtttttcctttcaatgaagcaactctcggagcttccaggaatggattaaatgtcaaaagaataatccaagagctccagaaactaatgaataagcaacattcctaagtggtaaaaaatcaaatcaagaaaaagtgacatggatttttaaaaaccaaggatcctgtcctagagaaagcaatagttcaagtccctacctgtgccaccagcatgttaactatgacattgggactgaagatgtggccatatgtataaatataacagctctgacaaagcacaatatgttcaagtggtgattaaactacattacatcccatgtttatttgctcaggtgtcttgaaagaattctacaaataccacacagcctcccaccagtaattgaatgtgctacactacgattatgctatgtatgtatttaaagaggagaaaaagattattctaatatttttaaaggattattaggtgaaaacagtacaaaagaagccaggagttaactttctgtgtgtttttttttaaatcaaccagttatttgttaaaattattttgttaacttaagatcagacaatcattcagagtgagataaatcactgaaagccctaatgactctgttgtttacaaatcctgggcttgaaatcagactttgcaccaaagagctccctgtgggggcatctttgggctgtatttaaatagtggccccttggccttgtcaccatttgtttaccatcacagcatgtgaggtcatggcctcccagatcaaagtatgctgtcattcctgccacataaaaagcatctgcagtcctaagacataaaaattccagtaggttacttgaaaacattattctagtgaaagtagtcagatacaaaaggccacatgttgtatgactccgttgatatggaatgtcagaattggcaaatccatcaaaagcagattggtggcttaggggaggggtaatgaggagtgcctactgatgggtagggggcttccctttggggtgacagaaatgttctggaactatatagaggtgatggttgcacaacacggggaattcactaagtatcactcatggtacattttgtgttatgtgtgttttaccacaataaaaaagttaaaagctggccatggtggctcatgccttcaatcccagcattttgggaggacaaggtgggaggatctcttgagcccaggtgtttaagaccagcctgagcaacataacaagactcttctcacttaaaaaaaagaaaaattatttttttattttaaaaaaaaaggtagggatggggaagtgcagacaggc

SEQ ID NO: 1176 - DNA, 367 bp, Homo sapiens
gttctcaactctgttccaggaaagatttaaaggacgcaagtaagaacgcaagcccgtcaaggctgctccgattttaaatgtcagttcagctcctactttatggggtttggcaaatagagttaagggccttttcctcaaatgctcaaacattccaatgagactaaatcaagcaactggaatcgcttgaaaaccagagaccagattccattctccctccgtttttttgaaatcttcacttctttatcactagctgggtttcgatgactcttcaggtgtaaaggtcaacctcacagaaatgggaaaacctgtgttgttaggaaggatggttttatgtgagcatttgaagttttagggcaagaatggcctc

SEQ ID NO: 1177 - DNA, 258 bp, Homo sapiens
ggttccccttgctgtgtcctcctggccctttccatgaaccttttgttctgacagggaggacggccggtggcctgggtctcacactcggccacttgagttccccgtgggcctctgcagcctcctctgtgggccacatgtgtgtggtttgggcagaacgggagacttcacaggcctctgctgggagctcgcttgtttattttggaagaattgtttgtctctgctgctgacagtgcagcctgaatcctgttttgttatttc

SEQ ID NO: 1178 - DNA, 288 bp, Homo sapiens
ggctgcgcctctccagaaaccggataatcagcgttaccaatgggcccatcgcattactggcaagcgtttcagtcgcctcgtttctaaaatggtttttccgttttgctgttctgagtctcgggtgctgtgcgtctccctccagggcacagtgatttgcggcactggaatccctcagtcagagtctcagaatctctgctcttccaagtgagtggccccgggcaaggccgtactctccctacacctcaccttcgtcgtttgcagaaacgagaatcggagcagacacggacc

SEQ ID NO: 1179 - DNA, 327 bp, Homo sapiens
gccccggggcagccaggggccttgtggcatagtcttccccaggaagaagcaaaggagagcatcagatcactctaaaaccctagtgcaaacacacgggctgccgcagtgtagacagccggactgtgctggcctgtagccaggcctgtggcttgctcccgccaccgggctcagctgtgtggacacagcaagctctcagtatacaatcggcactcatgaatcctgtctttctcatcctaaatgcccatcaattttgtaaagcaaccttacttgaagtcatgtcaaaagctgtgcacgtcccaggtgggctgaagaagaggcaaaattggc

SEQ ID NO: 1180 - DNA, 329 bp, Homo sapiens
gagagggtgggcagagcacacagggctcccgctcagagaggagctcagctggggaggaggaggaggctgggaaggcccatcaggagggacagccggaattcccgcggagtggagtcttgctcccagcccttcctaactgaaaagactgcgaaggtgccccgggctgggggcctggggtgggcggctgacaggtgtagggcctggaaatccagtggagtctccagcacaggagcaactgtggaatcagaagcgctgtgctcctgctcctcgttccatttgagattcaagccaggaaaagaattcatagttagacagagggctgagctgac

SEQ ID NO: 1181 - DNA, 79 bp, Homo sapiens
gatcgccccggtggcctgcggagcgtctgctgacggcttcccagcggtgttcaggacacacagggtgtggagacacggc

SEQ ID NO: 1182 - DNA, 139 bp, Homo sapiens
gcgcacagcagaaggaggcgcgttcaggagacggaggcgcgctcaggaggaggaggggcgctcagaaggaggcggctcgctcaggaggaggagccccgttcagaaggaagcgcgcacagaggagtttgtgttcttttgc

SEQ ID NO: 1183 - DNA, 303 bp, Homo sapiens
gttaaggggcttagacgaatgacaactccatgaccttacatgctgccaaacattgattaagtagaaacatgagaaaacggccccctgttcaatcaatcttactggagtttttcgaatgatcacctagggctgtttttacaaatacaccagctgtgaaaagataacaagaaaaggcaacaaaacaaaacaccaccttgtgcagacttacttgcattcccctggtttgtcacaaaatccatgctgctcatcacatccaggcaggcagatcgctacaagcaaaggaaaaacagggtcaagccccac

SEQ ID NO: 1184 - DNA, 372 bp, Homo sapiens
gtggagacgccttcccttcctgggtttctggcgcgggcgcagacccttccccagcctggagggcgctgccggtgtcagaagcggaggtttcggaggcggctgcagcctcggaatagccggtcacagccactgcgctgctgtcggtgaaaggcagcccgggacctgaggccaaacgcaagctcaggccgcagctaccaagggaacctgcctaagcgggcggcacagaagggagcgccggggacgctctggttttcagatcccctttcggaaggtgagattgtttttcataacaggcaaaggaagataagccccgcgcccggcgaaaccctggccctccctcgctgctgcctctggccctgtgtgcagctgaac

SEQ ID NO: 1185 - DNA, 154 bp, Homo sapiens
gcggtcgagctgtggcctcgcccctccggtggatctccgaagttcactgttctgacaattacacgccatgacttttgaaaaaccagctgaggccgggcgcggtggctcacgcctgtaatcccagcactttgggaggccgaggcgggcggatcgc

SEQ ID NO: 1186 - DNA, 130 bp, Homo sapiens
gccagccccgctcccccggggaaggagcacccccgggacctcaagttcagcatcgactacatcctgtcctccccagaccccttccctgggctcaagccgccctgcctcgcacaagagggcagatacccgc

SEQ ID NO: 1187 - DNA, 119 bp, Homo sapiens
gtgcctggaacccagcaccgtgagaccagaggacccagcagtgaaggaggcaaaccctgtccccgagctgcacacgctggagctgcacacgctggagctgcacacgctgagggtcaaac

SEQ ID NO: 1188 - DNA, 175 bp, Homo sapiens
gccagcacgtcgccccgcggtgctccccggtgtgaaagggctgagccatccctctgctgtgactggcttccggcggtttccagcgtcttgctttctgagcaacgctgccgtgaacatcccacaaactccttgagtctgccatgcacgtctttagagataggtggagagtcgtgcc

SEQ ID NO: 1189 - DNA, 63 bp, Homo sapiens
ggaaacgacgctccccaccgtgcacccggaaacgatgctccctgccgtgcacctggaaacgac

SEQ ID NO: 1190 - DNA, 86 bp, Homo sapiens
gcgctgcggggaaggggacctgggctccgcgctgcggggaaggggacctgggctccgcgctgcggggaaggggacctggggtccgc

SEQ ID NO: 1191 - DNA, 167 bp, Homo sapiens
gcctcagtttaaagccattcccaccctccccagttccctctatgttacacgcccgctacttaaggtgcccattagtcctttcccagccctccttcgcccacagcttccaactacagatccgctgctttactattagctcccggtgcccgacacacagcaggcgttcc

SEQ ID NO: 1192 - DNA, 372 bp, Homo sapiens
gaggccttggggggcacctcccgttgttcgcccccacccacatccgctcaggacacgcttcccacctccaccgccccctttccctgcagggacacctgcctcttcctgcctccccgcccagcctgcctttttcttgcacgtcagccaaaatccgattcccccaagactctgcctcatcaaagatcctctttctcatcaccataattttccatttgtaggttaagctgcacctggggttctcagaaatctgctaactctcttccaactccctgaactcctcaaacgcctcgtcctcccctgcttctgttgttcagaggacaggacgtagcaggtgggggcgtggagagggggcggctggggagtgccttgtcc

SEQ ID NO: 1193 - DNA, 172 bp, Homo sapiens
gtgtgagggttacactgggtggggcggggtgtgtgcgattcgggggtgtgtgaagcaggatgcctttgcaactctctgcacaaccacagtgtgagctatggggtggggggggttccagccttcctgtcccagtgaggctgcggcatcttcctgtgggacaccggcttgcggc

SEQ ID NO: 1194 - DNA, 131 bp, Homo sapiens
gctggggctgggagtggctgagactgccccagccccagcagcgagcggacgtcctgggccccggcagctcgtccccaacccccgctgtgggggaacctaccctgtggaagcctgtattggtccactcggcc

SEQ ID NO: 1195 - DNA, 331 bp, Homo sapiens
gcttcgcctcctgtctgtccctcgcttctctttcctgggcctgctgcccctaaacgaggtttttttttttgacaactgactgttttcaagtatgattcactcaggcagattttaattggtgacatcagcacagcatgctaatgctacatatgacttaagcacacgttacctcatttgatcttcagaaccgccaggcaggcacagggctgagggaagaggactcagcagctgcgagctgttgtggctgccctgtcgctcagaccacggaggggcagagccccggctggtgctgcaaacagaggagccgcccaggctgcggccctacagtccc

SEQ ID NO: 1196 - DNA, 134 bp, Homo sapiens
ggggaaggctttccagggttggggtgggcagggcttctggaatgagtggacgaaggccttgcaaaatgggtggccgaggccgggcgcggtggctcacgcctttaatcccagcactttgggaggccgaggtgggc

SEQ ID NO: 1197 - DNA, 205 bp, Homo sapiens
gttagcagcttgaccgggatcatggccagctccaattggtctacacgaatggtactctgagggtcatttgtcatgcaagtaacccctgccctcccaccttctggcttttaatatattagcccgggaaatgcccggcaggaacgcaaaccgctggaaaagatctctgggttgcattccaggcagacggcagtggtacccactcccc

SEQ ID NO: 1198 - DNA, 709 bp, Homo sapiens
gagagagccagcaccccaggaacccaagcatggagctcaggatcagggaacaaagcccatcactccacagcccttctgcctctgaagatccaaagaatattaaacaggaaagacaaaacaaacgacaacccggaaagacagaagtccccagggaagggctgggaatctagagctgggctgattcaaagcctgaagcttccttgggagtgaagataaacgcagcacagcgtcgagtcccctgccggcttatgaggtgtgcaaactctgcgatttgtttgagggaactggcctctgggccttcctggtttcctgtgcctttaccagaagcccccatctgtccctccctctgcaggggccctccagccacctcctctcaggaggtttcatttggctgtggtgggcacggggaggagccgtcagaagcaggggtactcagtgtctgtggaagttgctagacgtgcaagttttcctgctgacaccagagtttcagccaggcagggtgcgcttggcttggcagctttccatggaaggggttctggagcatctttttctcctcctcttagctctggatggaggggggccacctcctcacgtccctcctcccttccccacacgcagctgcaccttgtctgcttcctctccatgtgcagaattacctttgggatgaggttaatgactctcctctgagcagccattgaccctggcctcc

SEQ ID NO: 1199 - DNA, 553 bp, Homo sapiens
gttccttatctctgtgtgggcaggctgctgctttacattgtttttgtttttgtttttgttttgttttgtttttaactgagtcccacagttagcaacttgatagttgctgcctcatcagtttagaaattgaaaggtgacctggataagtaatgctcagctttgtaaaaggtggcagtttcttcaagccagatgaaccctggatactgttcacagcacactggtgttgaccctgacgcttgcggctggctttgtttgcacttggtcgtctccagtagaaaaaccgaggctcacggttttaagcccagaactgatcgtgaagccggtccattaagctctgggtggataatgcacgctctctgcgactcccgcctgccggagcaggggtggaattgctccttccgttgtcagatcttctaggcagtggcagggaatcatcttgaaaatgtctgcataggtggttgccgtgctatttcagtcttccagtgtgtcatttgagaggtggcagatcccacctgggtgccacagcagttgccctggcagacaggaagtagcc

SEQ ID NO: 1200 - DNA, 318 bp, Homo sapiens
gcccccaggaccccagtgcagtgccggctctgcagcaagtgggtgccggccacgctggcgctgcgcacagcccgggagccaagacgccgttcctcccacacgtgtctgaggtgtcagtcgccatgggaacagcctggggtccggaagtgcgcgcattgcagtcttgcacctcaaaacactgcgtaaaagaaccccctgggactacaactcccagaacccccccacgatgccatgattccggttaggccaccctgcacttccagccacagccatggctgcagtcacatgggaggtggccatgggctggcagggtgtggc

SEQ ID NO: 1201 - DNA, 462 bp, Homo sapiens
gtgatagttgtggaaaaacttatgtatatagacatgcatgcatagaaatctagaattgtgggattaaaatgtaaagcgtaaattgtttggttggacagtgtgctcagcgtgcctgattctgcctccagctcaccttcctgcagctgcctcaggaatgcacctggaaatagccagaaataattttgtctcgtcaagctttctgttcctgtgtatatacagatttggcatttttgcagtgacagttcattgacaacgaatacccaccacattgctcagtaatctaataataatcagatatgtcctgtgtacttaaaagcaaccagcttcgtgaaagttaaaacatcctagctttcttagacattaacagtcaaatttgctttgacttttcaaaagtcaaaactacttttcgtagttgaatggagtgaagaaggagaggcaaaagatttgtgtaagatttcctgc

SEQ ID NO: 1202 - DNA, 269 bp, Homo sapiens
gagtgaggcaatgcctcgccctgcttcggctcgcgcacggtgcgtgcacccactgacctgtgcacactgtctggcactccctagtgagatgaacccggtacctcagatggaaatgcagaaatcacccgtcttctgcgtcgctcaccttgggagctgtagaccggagctgttctagaaatttctttaaaaactaaaaatattgctataaatttccctctacacactgcttttaatgcgtcccagagattctggtatgttgtgtcgttttc

SEQ ID NO: 1203 - DNA, 247 bp, Homo sapiens
gcgccactgcactccagcctgggcgaggcagaccccgtctcaaaaaaaaaaaaaaaaaagaaaaagaaaaaactacagcctggccgcggtgattcacacttgtaatcccagcactttgggaggccgcgcgcggggcggaggccggctggaggggaggtagctaacttgaggccaggagtttgaggccagcctggcccacataagcaaaaccccgtctctactaaaaatataaacattagccgcgagc

SEQ ID NO: 1204 - DNA, 963 bp, Homo sapiens
gggggccctgggaaggggaactgatgtgacttccgctgagggtttcagcagtggcatccgggtccggggtcacggccgtggatggggccggggccggggtcgcggccgtggatggggccggggccaagaccgcggagttcgcggaggcaaggcccaggataaggagcggatgcccgtcaccaagctggacggcctggccaaggacatgaagatcaagtccctagaggagatttatctcttctcgctgcccatcaaggaatctgagatcattgactttttcctgggggcctctctcaaggacgaggttttgaagattatgcctgtgcggaaggagacccgcgccggccagcgcaccaggttcaaggcgtttgttgccatcagggactacaatggctacgctggtcgggttgaagtgctccaaggaggtggccgccgccatccgcggggccatcatcctgaccaagctctccattgtcaccgtgcgcagaggctactgggggaacaagatcggcaagctccacaccgtcccttgcaaggtgacaggccgctgcggctctgtgctggtgcccttcatccccgcgcccaggggcactggcatcgtctcagctcctgtgcccaagaagctgctcatgatagctggtatctacgactgctacacctcagccaggggctgcactgccaccctgggcaacttcgccaacgccaccttggatgctgtctctaacatctacagctacctgatcccctgaaggacttctggaaggagactgtattcaccaagtctccctatcaggaattcactgaccacctcgccaagacccacaccagagtctccgtgcagaggacccaggctccagctgtgactacaacatagggtttttatgcaagaaaaataaagtgaattaaagcctattactgtcaaaaaaaaaaaaaaaaaagacatgaatgtactgggtatgattc

SEQ ID NO: 1205 - DNA, 193 bp, Homo sapiens
gagaccattctggccaacatggtgcaaccctgtctctactaaaaatacaaaaattagctgggcatggtggtgcgcgcctgtagtagcagaagttaaactattcgggaggctgaggcaggagaatcgcttgaacccgaagacggagtttgcagggagcagaaatcgcaccactgcactccagcctagtgacagc

SEQ ID NO: 1206 - DNA, 405 bp, Homo sapiens
gggctgtggcggtggccaggagccagcagccctctcactctctctggaaggcggccgttttgtctgctggtgctgcatcaggggccacctgagcctgcagcctgaggacaaggctccagggacactgcctcaggccacggttgaccctccagagtcaatcacgtctatgtgtctctaggagaggcaaaaattgtcagtggtctgcaaaccactctttcgttctagattagagctgcaagttgagagaggaagaaaaaggaaaaacaaaaacaaaccccgaagacacaagtactgaatagtgtcaaaatgagctaggctccaagtccatttttcatattgttccctattttcaatagctactgggtgccagaggaaaaaaaggaacaactttaaaaaacaatcagc

SEQ ID NO: 1207 - DNA, 1632 bp, Homo sapiens
gaaggaggtgccaaggtgggaagcacttccctgtgctccctgcagaggaccctgttggcaggcagaaaaggatgggccaggaaagtagggaaggagtgagacgagagaaagaaaatcacagatgtcccaagtttccacaattttatcaaaaatttttccatgactcatcttgtgccttctccccaaatttaacatgataaaaccactggcctaaatataattaaactgcaattactcaagagtaagagggtggtaccttttaatcaaccccttcattccctcaaacacagaatccaaggtgggaaaataaagaacaaaaactgtctgtctctcttcttcccaacctgatttccttgctctatggccctctgagagggagagcaagtcagaaggatttccagaataatttcttcccacccaaatgtggggaaatcaagtgaaagctgcacagagacagctggaagactgtcatgttttgcttgtttgtttcctcaacccaacttcaagacatgctcagctccaacacactttgctttacctttctatacgttaatctgccaggaaagtttcttctacggtgaggctatttgggacacctgataatcacaccagctattgtttactgagcacctactatttgccagatatcttgcaaaattatctcttatcatcacagctccatgaggcaggttttatcacttataattttcctgataagaaatgaactcagagattaagctatttgtccttagtcatccaatggcagagctgggatttaaactcaagactgcccaattctaaaagtcccctctgactttggaaggagcagtggtgaatagaacaggagcaaaagcaattcagagtcgcttttgtgattgcttttgaattggtacacactgtcacaggctccggatccaggcttctgatccaacccacattggttttcctcgcccgtcagataagaggagccatgcttgacctggaaggtgttgaaagacatgctgctgtgtgcagcttatcaaagggaacaaggttcaccatcactgagacctaggaaggggccgtggtccagctggaccctagtcgagctgctcaggggcagcttgggctgtcgtccagggtgcacgaagccatagccaatgtcaagggctcctaatgtccaggcaggaaactgtgactgaaaagctgaaaaaacatatgatcccataaaaagctgcctttggggaaacaagccattagtcagccttatttatttttccttcttgctgcaaagttcaatacagatgaaggagctgcgattatcatataaaaggctatgcaaaatggccctccctctacgctgctgaagaaaactttaccctggcttttcgccatagttagctttgtttgtgttcttcagattccgagtcctttgaccacagttgtgatggcccaagtagaagcgcaagtgtgtctcaaaataaacaagcagtgctggaactctctagagtccccactcatctccacccgcagtcctgccttttatcctggctgatgatggaggccagaggaaagggatagtggtggccttattaagacaagatcttctgcgggaaaaatatgcttaatgagcttaggaaaaaccttgtggtc

SEQ ID NO: 1208 - DNA, 145 bp, Homo sapiens
ggtgtgctcaagcgctttcagcaccagccaggaccaactaagaggggagcccttagctcccagtcaccgcgcagccctacaggaggccaaagcggctggcacagatgcactggggccactgacattttccatgtcctcttgtcac

SEQ ID NO: 1209 - DNA, 127 bp, Homo sapiens
ggagtagctggtactacaggcgcccgccaccccacccgaagaattttttgtattcttagcggagacggggtttcaccgtgttagccaggatggtctcgatctcctgacctcgtgatccacccgcctc

SEQ ID NO: 1210 - DNA, 585 bp, Homo sapiens
gtggacttgtttatttttttccatatcttccactaaatgtcaagctatgagcagaaataaattatgtctgttttgttcacatttacttctcaactaccctgtaagtccctggaacatagtatgaattccataaaaagtaattgaatacatgagtaaatgaaggatgcatgcaggaatagatgagtagaatcaacacaaaattaaccatgggtttcattcaacacatacctcaccactcctgcatgtatataagattcttctgaaagcggggaggagccaagatgcccgaataggaacagctctggtctacagctcccagcctgagcgacgcagaagacgggtgatttctgcatttccatctgaggtaccgggttcatctcactagggagtgccagacagtgggcgcaggtcagtgggtgcgcgcaccgtgcgcgagcctaagcagggcgaggcatcgcctcactcaggaagcgcaaggggtcagggagttccctttcctaatcaaagaaacgggtgaaggacggcacctggagaatcgggtcactcccacccgaatactgcgcttttccgacgggcttacaaaac

SEQ ID NO: 1211 - DNA, 275 bp, Homo sapiens
ggctcggacggtccgatgggcggcatgggtggcatggagccacaccacatgaatggatcattagggtcaggcgacatagacggacttccaaaaaattctcctaacaacataagtggcattagcaatcctccaggcacccctcgagatgacggcgagctaggagggagcttcctccactcctttcagaatgacaattattctccaagcatgacgatgagtgtgtgatccccccttctccgagacgctgagagagccggcattgcaggcgggaagac

SEQ ID NO: 1212 - DNA, 693 bp, Homo sapiens
ggtaagtgctgggagaactttccattggcaattaaaaatagattaaggcaagtgtgtgtgtgtgtgtgtgtgtgtgtgtgtgtgtgtagagatggatggtgattgctgatcacagaagcacaggcacgtctcaagaactactggaagaaaggaaggaggcaggcaagtaggcaaaattatccctttggaaatctgcccacagtccctgctgagctgacgcattcattcactattcactcaaagcttatttatgatatgacagttactgtgctcaacactgaaaaggcaagacagaataagacatgtccattggatcttatccaaggttggctgcgggaatgcagaaacgaatactgtctaaaaattagccttcaatgcacggacacatttgcttggcaattaaaagtaagctactcagaagaatgcatgattcttttgcttcactcatgctccccacatcatagaaaactagcaggcccattgcccagggcttttccaggtttgtcctaccaaaccaaggtggaaagcaagcccctccgcttcggcatgcttttcaacctgtagaagtatcaactctatcatttttcaatcaacttttattcacaagccaccctggtgtgcagtaccctcctaaacatcttgaccccctattaacagtacatctaagtatataaaagcaaaatctccatacac

SEQ ID NO: 1213 - DNA, 339 bp, Homo sapiens
ggtgggcaaggggcagagacgcacaggaggaagctatttcaggatacatctataggacttggtgacagatttggtgtggggaggagagggaggcgtggagtgtggctgctgggttcctggctggggttaggtggtgtatggagatgcaaaggatccagaatggattgggtgggccacatgctgacatgggcgttgtcacgaaccttcaatgtgattggagctgccaccctttcctggctctttagcatgagaagggccagcttagccagaaccccaaaagcggccagcagggaccacgctgggcacaggtccagggacagcagtgaggctctgctgagc

SEQ ID NO: 1214 - DNA, 309 bp, Homo sapiens
ggcgctccagggaggaatgtgcacaggccaggacgcagatgcccctgctaatggcccagtgtgccccagggcccactctcctgcccgcctgccctgcacagccagatgtgggcctgtgccttttattgtgtggctccaagtgagtgaaatgttacacactgcagctgtgttccagggtgatggggagagcgcagattcctgaatcctccagcgagaaataatcccagggcctggagcagagcccgggctctcctgtaaaaagaaaagcaactgcagacggcagtgaacggccttggccagacacttccc

SEQ ID NO: 1215 - DNA, 1716 bp, Homo sapiens
gcagacgaggtccccccagcaccctggcagggactgtaccatcaacagacaaatggcagccgaccaaggaggcgactggcgtgtggaacaggtgatccgattgtttttctaaagagcaagggctaggacgtcctacgtgttcatatgcacaattttttgaactccatcaagaacacgaaccccatgcccacatcttcactgctcaattcacattgtctgatatgcaccttccagggagaaagaggttttcatggagaaagaggcaacgttgactatacgtgtttactcaaagcttttttataccggactatatgccatccaggtttaagagaattccaggcaggctctagcattatgtttttcacagaaaaagccggtgcagtagcccggatgcccagatccactcatttcccaaaccggttcccacacccgctgcccaccacctggcgaggaaggagcgggcgaggttcgctcgaatcgtcgtcacgggtttccgtgggtacagttattactcgttacataatattaaacaattaagattaaaaatggttacataatactgtcctatggctggcggcaacgaagctcgggatctcggactgcagcgagcccgcggcaggcgggcagggggccgcgcggcaagacctccccgcctccctcccgggccctgtccgccgcggccggggcctctgcagcctgcgcaggccgatccgcccgccgccccggctcgcgcccaccgcccaccgcccaccgcccagcgcccgcggcggagcccacctgagtacctggagagcgggcggcagcactggccgcacggggtcgctgcgtgtgcgccgccggcccgggtagggcttcggggcccggcccccgcagtgcccggcgcgtggacagcgctccgcatggacagcgctcggagccgggccgggctggtcctccacggctccgccccggccaggggcctgcggcgcagaaaaccgacccggggcctcggggccaccgcgcgccaggcgaacgcgctagcacgaaaagcgggccaacgccgcctctggggacgccatccgggcgagggtgggatgccgcgccaccgcccgagcgtgcccgggggctcccagcgccatcaccacgcaggtgcccgggggcccctccgcggagccggctgccgcccggctgcaatactcagcctccgagggactgggcgctcctgaggagcgggaggacgacggagcagcgcccggtcctggagcacaacaggaatcccaggaccaaacccatgtgacgcggccacgccccaacgcccggcgggggccctctgctgcccaatccccggatccctggttctcatggcaaccctgaagaaccccttgttccctccactgcctcctctcctcccccacagcccccccgcctgatgggcaaggacgcgcacactggccactctgacgatgccgaaagccctccatgtctacccgctacgccgcattcgcagacaggcgggggacatcgcggccgcggcaagctagagatgccgcctgctcgagcaaccttccacctgcagggccggccagttctactcttccaggatcactctcgtctcacccttctccccaaaatgtcagagcaagaaccaggaagggagaggctctttctggaagccacaggcataacgttactgaacaacgaggacaaagtagggtcccatttaaactgagagtcagc

SEQ ID NO: 1216 - DNA, 238 bp, Homo sapiens
gggtaaagagccaggcagtgaactctggccacatcggaactcactgcctccccgagcacggcctcggaggctgagaggcctgggaggcagggccgcgtcctgcgggctccacgagagccctgtgaaatgccagtcagatcctggcccagtgccccaggtcctcccgcagcctcggcaaagccctcccccggcgctggaaaccttcccctgccaggcgcagaaggccgcgcgcaagcac

SEQ ID NO: 1217 - DNA, 279 bp, Homo sapiens
gttttgtggtgtttgcacttttcagtagtgccaagctctgggcaggaccaggcatgccaggaccttgaaaagtgctgcaaacggcatcagcctctatgctgcccggtgtgcatggcaggagcaggccattggtgggcgggtgggaggaccgatcccccactggttttcactgtctgaccgtcacagctgctactgccccactagttcttgcccgcggcacagatagagcccatttctcaagatgggaattgcaatagagagcttaattcgtgcagaacc

SEQ ID NO: 1218 - DNA, 1691 bp, Homo sapiens
ggtttgccagtattttaatgaggatttttgcatcgatgttcatcagggatattggtctaaaattctcttttttggttgtgtctctgccaggctttggtatcaggatgatcctggcctcataaaatgagttagggagtttttctattgattggaatagtttttctattgattggaatagtttcagaaggaatggtaccagctcctccttgtacctctggtagaattcagctgtgaatccatctggtcctggacttttttggttggtaagctattaattattgcctcaatttcagagcctgttattggcctattcagagacttaacttcttcctggtttagtcttgggagggtgtgtgttccaggaatttattcatttcttgtagattttctagtttatttgcatagaggtgtttatagtagtctctgatggtagtttgtatttctgtgggatcagtggtgatatcccctttatttgattcttctctcttttcttctttattagtattgctagtggtctatcagttttgttgatctttccaaaaaaccagctactggattcatttattttttgaagagttttttgtgtctctgtctccttcagttgtgctctgatcttagttatttcttgccttctgctagcttttgaatgtgtttgctcttgcttctctagttcttttaattgtgatgttagggtgtcagttttagatctttcctgctttctcttgtgggcatttagtgctataaattttcctctacacactactttaaatgtgtcccagagattctggtgtgttgtgtcttcgttcttattggtttcaaagaacatctttatttctgccttcatttcgttatgtatccagtagtcattcaggagcaggttgttcagtttccatgtagttgagcggttttgagtgagtttcttaatctgggttctagtttgattgcactgtggtctgagagacagtttgttataatttctgttcttttacatttgctgaggagtgctttacttccaactatgtggtcaattttggaataagtgtggtgtggtgctgagaagaatgtatattctgttgatttggggtggagagttctgtagatgtctattaggtccgcttggtgcagagctgagttcaattcctggatatccttgttaactttctgtctcatgatctgtgtaatgttgatagttgggtgtaaagtctcccattattactgtgtgggagtctaaatctttttgtagatctctaaggatttgcttcatgaatctgggtgctcctgtattgggtgcatatatatttagaatagttagcccttcttgttgaattgatccctttaccattatgtaatggccttctttgtctcttttgatctttgttggtttaaaatctgttttatcagagactaggattgcaacccttgcctttttttgttttccatttgcttggtagatcttcctccattcctttattttgagcctatgtatgtctctgcacatgagatgggtctcctgaatacagcacactgatgggtcttgactctttatccaatttgccagtctgtgtcttttaattggagaatttagtccatttacatttcaggttaatagtgttatgtgtgaatttgatcctgtcattatgatgttagctggttattttgctcgttagttgatgcagtttcttcccagcctc

SEQ ID NO: 1219 - DNA, 112 bp, Homo sapiens
gccagcagcacatggcacctgccaagcggcccgctggcaagtgtgttccgtgctgggtaagtctcctcccttcctggaaaggatagcgccccgctgagcagtgggatccgcc

SEQ ID NO: 1220 - DNA, 1032 bp, Homo sapiens
gccctccactctcaaagcacatcactgcagtctctttctgtcattctctctcctctttgccttctcctcctctgtgggcaggtctccatctgcctcggtggtataaggactcctgtgattaattggccccacctgggtgatccaagataaccatcccatcttcagagccttcactgaatcacagctgccaagttccttttgccatataaagtaacactcacagattcgggggattaagacatgaacatctttgaagggccactattcagctaaccaaagcatccaagaggctcctgttagagcgtgaatcagaccctgtgcctcctctcctcaaaaccctgccatggctcccacttcccacatgcaaagcccttacagtggtcacatggtaccacacatctcttctcctgtgactgcccatctcatcttctcctctcctgcctcacttggttccagttactggcctcttggttgtacttcaacactccaggcaagcacctgcgtgagggccttggcacatgctgttccctataccaggaacttttcatttcatttcatttcttttctttttcttttttctttttgagacagagttttgctctgttgcccaggctggagtgcagtggtgcagtctcagctcactgcaacctctgcctcccaggttcaagtgattctcctgcctcagcctcccaagtagctgggactacaggtgcacaccaccacgcccagctaatttttgcatttttagtagagatgggtttcactattgttggccaggctggtttcaaactcctgaccttgtgatccgcctgccttgacctcccaaagtgctgggattacaggcgtgagccaccgtgccaggccttcttttctttttttcctctcccttcccttcccttcccttctcttcttgttctcttctctttcctattaccctttcctttcccctttcctttccttttccttttccttttcctttctttttttttgagacagagccttgctgtgtcacccaggctggagtgcagtggc

SEQ ID NO: 1221 - DNA, 37 bp, Homo sapiens
gacggcccagcggagccgcatgcctcccgccgcgccc

SEQ ID NO: 1222 - DNA, 1493 bp, Homo sapiens
gtggtaggctgtacaaactaggtgtttgtaatattctctctgacgtttgcaaaatgatgaaattgcctatggatgcatctgttagaacgtatccctgtcattcagtgatgcgtgactgtgctaaaatgctaaatctaagtttcaatgacctccataaaattgttgtactgtgaaatacaaatctctcacctacggcctgaatatgcttgcaaactaagcagatcatgggaaggagaatgtgctggcatcgctgggatgattttctcacactacatgaataatatctccagactttgcgaatatgagccacttgcatagagttaaattaagcatctctttgctgggaaatttatcaaatgggagtatgaagtgtttttaaaagatacttgtttgtttgtagacggtaggcttacagtggctcatggcaatggttgaggttgctaagatttggtggaagaaggcaaaatgaaatggccacttatatggtataaggatcacttgtttcttttgagttacagattcagctggctatttctccgaatgttagttatttggagaaaagaaacatgatagtaattttggggtaacaaatacaatatttgatgaaagcaaatttattgagggttagacaaactacaagataatttaggctgcgaagtcaacacgagacttctggcccaaattgtgcagagtttgcgtccagatgcaaagttcaaaggaagaggccatataagatgattcgcacttttgtcaccaactgccagttcaaaggtttccccagaacaccctcagtttcaagaatttactaaaaagactcacagaactcattgaatgccattgtactcaaggtttataatagagaaagggtagaaattaggaccaatcaaaggaagagacgtatcacataagttggagtctaggaggattttgaatgttaagtttccattgtcttcagcacatattacctgtcattgttgtacagcaataaacatggagtactaccaacctggggagctcacctgatgctaaaaagacactattttgaaaatgaaaagacaaaggaaaggaggagataagatgaccttccacattaaggcattggaaagaatagcaaactaaacctaaagccagcagaaggaagaaaataaaaattagagaaattaataatttataatattaatcatatttgttagtattgactaattgatattaattcctgactgactttttttaaaaagagaaatattcacttcccaatttattctgtggggccagtgttaccttgatacaaaaattagtccaaatagtgtagaaaaataaaataactataagtataaatgcaaaattccttaaaaaatactaaaaaatcagatctagcaacatataaaagaattatacactatgacaaagtgaaatttatactagtaatctcaggttggtttaacagcccaaaatccattaaggtaatacatcttatccatagaataagacac

SEQ ID NO: 1223 - DNA, 402 bp, Homo sapiens
gtggtaggctgtacaaactaggtgtttgtaatattctctctgacgtttgcaaaatgatgaaattgcctatggatgcatctgttagaacgtatccttgtcattcagtgatgcgtgactgtgctaaaatgctaaatctaagtttcaatgacctccataaaattgttgtactctgaaatacaaatctctcacctacggcctgaatatgtttgcaaactaagcagatcatgggaaggagaatgtgctggcatcgctgggatgattttctcacactgcatgaataatatctccagactttgcgaatatgagccacttgcatagagttaaagtaggcatcactttgctgggaaatttatcaaatgggagtatgaagtgtttttaaaagatacttgtttgtttgtagac

SEQ ID NO: 1224 - DNA, 1671 bp, Homo sapiens
gtctatttattctcatttatggacattgagaaaagaaaataactttcatgagagaaatgcaagtcctttaaataatcaggtccagagagatactcaaatgagacagaagttctgtcctgctcctctttgagctgtgtgttcatctaggctgcttgctgttgccacagtagctataaattaaccaataatgccacatcagacactaatccacacccaataatagtgtaacagtgtatagccagtcactaataaatgttatttccataagccaatgagaatttgtgacaaacctctttacatcatcccacttctggacccttttttgcctttaagaaactgcttcttgcaaagctccaaagggagttcatatccaaggatacttgggtctgtttcttccaggcagctgtcctcattgtggctcaagtaaactctttgaattacgttttgtgcttcagccccttccacttagattaacaacatggatttgtgtcaccatgtacagcaattaaaatgtttacacttttcccctcgagggcactgatgtgttttcctgagcacttggaatagctacgtagtgtttcctgtctagattatggtttctcaaccttgttgctacttacctttaggaccagaggattctttgttgtggaaggctgccctagcagtgctaggtgtttcgtatgacctctaaatttcacacctccaccagtcttgacatccccacaataaccctagatattgacaaatgtctcctgggaaaaactctccaccagttgacaggcaaagttctggaaatattggaattgtcaattgagatttaatgttatccaaaacaaatatttttctttgttttcaaacatctacttccatctacttatctacttatttttacttttatttgtaacttaaatccatcaaggagagagagtgcattttctgttatgctaaatttttgcagaatgtattgattttttaggacctgatatatggatgatatgtagatattacatgtttgtattatcaaatttcagggtgataaaaaataaatacttataatatttatattgtcactgtatattagttattttctttcttcactacaggagtttttcaacctataggctatttttcaattctaggttatccagtagatgttgaaatgttgtgattaaatatctacttctcaagcattcatctttgcaaatgaaacaatcccaagctcttataatacacctcatataaaggacagattagtcaatatatggttcagaaataattatgtaatatttatagaaaattaaaaatttagatccttaactcagataacaataatccaaattaaaatttgatttcattacataatttaaaatgacaccagaatactagtaaaaatgtagataagtttatgtaatctttttagctgtaggactttattagcataaattcaaatacaggaaccaaagtaagattgagacctatagtcaaaggttaaaatgtacacattatagggacatgattaaactaatttaaagcatgataacatggagaaatattgcaaaacatacattttactgaattaattgttaatatctaatcattatgtgagaacaaaattaaagagtagctacacacgcacacacccacatacaagtgcaatattgtcaaataaac

SEQ ID NO: 1225 - DNA, 120 bp, Homo sapiens
gggggcaaaaagccgcggcggcgggggcaaaaagctgcggtgatgggggcgaaaagccataaaaagccgcatcgtcggggtcagaaagccgcgacagcggggtcaaaaagccgcggtggc

SEQ ID NO: 1226 - DNA, 87 bp, Homo sapiens
ggctttctccccccagccgccgcggctttttgcccccactccgccttgcctttttgtccacccaggctttgtgccccctcgacgccg

SEQ ID NO: 1227 - DNA, 109 bp, Homo sapiens
gccgccgcggctttttgaccccctggcactgcagctttttgcccgccctggctatttgtccccccgccgccacgagttgttcagcaccccgggttttttccacccctgc

SEQ ID NO: 1228 - DNA, 27 bp, Homo sapiens
gcatggattccgcgagtacactgtcgc

SEQ ID NO: 1229 - DNA, 416 bp, Homo sapiens
ggtggtggcaggaaggagggacacaccagcccaggcagggtcccatctgatgcacccatcctctcctgggtttcccaggcacattcacaggggcagctcttgctctcgatcagtcttctagttcttggtcttattcacattctgttgctagatttgatttactccaattattcccacagtcccgaagggctgctggggacttgtaaattcagctttctgaattcttgctaaccacaagcagtttctctagggggtgtcttcttccctatctaaagtttctttctgaagcttattgaatttcaagaccacattatatttccagctggtgtttttcaaagatggcacatcctctgctggtgcccggatgtaggaagccacacgtctggacggcctggggagaaaggagcgctgggaac

SEQ ID NO: 1230 - DNA, 213 bp, Homo sapiens
ggctaatttttgtatttttagtagagacggggtttcaccatgttggccaggctggtctcaaactactgacctcaggcgatccacctgcctcggcctcccaaagtgctgggattataggtgtgagccgctgcacctggtccctttttgtttttcaatccatggagcagagagagaggttctagaaaggtgacaaacaggagaacgtgcagtccc

SEQ ID NO: 1231 - DNA, 591 bp, Homo sapiens
ggagaggagagctggccaggtttctgttcaaaccgaactacgcctatggaacgctgggctgccctcccttgatccccccaaacaccactgtcctgtttgagattgagctgcttgacttcctggactgtgctgagtcagacaagttttgtgctctctcagctgtaagttccagagcacagatgtcagcactttatagagagacgaatgggttggtgttattggtaattcttctagatggcctgccctgaggctgatcgtcctctccagggtacccccgcggctcctgtgcggtggcggcggagttcctctgcttcctagtctgtgtttgtcttagtaatggctctcatgtgtagataaatgtgctgggcaaggtaaggctgtgagtttaaggattagtggtttgaactgatttttcagtcatcctttgcctagttctccctgtgagacagtgaacacttgcttttcatcgtttggtttccagcaaggcaggcattggtagctcataactagggtgactgaataattgattgtccagcccagcacaggtgagagtaaaaggggctgttcactggaggggttacccatgacatc

SEQ ID NO: 1232 - DNA, 1032 bp, Homo sapiens
gattggtgctcaggaaatgttggttggactaagtgtgaaatagccgaagcaacagaccagcctctaataaaacatcctccaggctggctctgggattggctgttggacccttggtattgccagggacagaaacctatctttagcatcagccagaaaaaaaaaaaaaaaaaaaaagatttgcagaaggggtcctgggagtggctcacagagttgaggaggagtttggcagtccttgggcagacagtgaccaggcagctctgagggccttagggactcagtctcccctcggctttgttttctccccctgtagggagtgcccatacatccctttctgcaacctcctccctaatggagtgagagttctgtaccctaaaagtccctcctcttcctgccccaaacataactcttcagtttgaaagatcctgggcaggactccggcctggttgggggtatgtagaaccccatgaatgggagtttgtgttttgtccttcctatcctgacatgctggtatctgaggcccttgtgatcattttactgtgtctggaaaggagctgtgaagggagctctatagctattttcaggcatttaaatggttaacatacaacaggtgaaatttgttctgtggtttccaaaggtcagcaccagtaagctgacacaataggaagacagaatctgacctgataggagatttaccagtcaaatgtcctgccatgagttctcccaccatggagtacacagtggaaggggccacttttgactgcttttggggaaacatctgttcccgggccactccactttgttccacggggctgtggggcatctcgggagctggtgcagtccctgttagggtctatccgagcagagctggagggcctgagaggtggttaaagggagaaattagatcaccttcctggtcgtttttaccatcaggtaattgcagaccttcaaggcagaggtagcagctcccatccccaaggcacacagcagagatgaaatatgacatcctatacttagcatcaaaaaacaccaccc

SEQ ID NO: 1233 - DNA, 142 bp, Homo sapiens
gtggtgaaaccccgtctctactaaaaaaaaaatacaaaaaattagccaggtgtagtggtgcgctaatcccagctactcaggagaatgaggcaggagaaccacttgaacctgacaggcagaggttgcagtgagccaagatcgc

SEQ ID NO: 1234 - DNA, 497 bp, Homo sapiens
gtcttgcccaaatgctttggaaactgccaaaggacactcagaggccagggagtgtgacaggcaagcacaaatatgcaaaagagatggcaccaacatagcaggcacgcagggccggcgctcgcaggggtcggggatctggagccaggcccccgccgccgtggctgcgccagtggtgccaagacccagcaggcagcaccggcgcatgccaggcaccgagtctgcaaaaggggccctgagccagcggccagacacctcgcagactgcgggaagcaatcgtggcggccgcctccccggggctccacggcggacccgccgcctgccgcggccatccccggcccgctcctgccaggcccccgaccagacacccagaggcacctgctctgcgcagccacgcagcccggctgcatgaagcccggcatggtgccccggcctgccaagccagccacggcgtgggaaaccgccgcccaccaaggcaagggcaggaagaagacagcggc

SEQ ID NO: 1235 - DNA, 229 bp, Homo sapiens
gtaggagaggctttactggatgtggggttcggtgtttatggagatgcagcccttctccctccagcttcgtgcacgtgtgcacagacagcgagtgaggccgtcagggtgggctcctgccacgtcttggcccctccccagagtcgctggacttaggagctagtctgcatgtgacagaccttcccagtcagtggcaggcgtttcccgggacagtgtctgtgtggcggtcggc

SEQ ID NO: 1236 - DNA, 2287 bp, Homo sapiens
gctcctggtacacgcgcttcaacttcggttggtgtgtgtcgaagaaacctgactgcgccctgaggagaacagcggagaaggtccaccgagcctggcgaaaggtccgctgagcgggctgtcgtccggagccactccgggctgcggagcacccagtggagaccgcgcctggctcaggtgtgggaccccatccttcctgtcttcgcagaggagtcctcgcgtggtgagtatgcggtgaggacgttttttttttaaagatcacgttcattccccgtgcttatcgggagctgcgggagatggagtagcaccccagaatgtctccacgcaaaacttgtcacgccttcactggctgtaccccaaaacaaatggggaaaccaagccttaaaggcttgggtttccaggaccaagtccagatacgggctgtagacagagatgagctgcggacagtgatgagctgcagacggtcaggagctatagatcgatttgcaatttgctcttcaaatgcgctaccaagtgccatgctttacaaacagataagcgcttcaaatgcgctacaaactggcgcttcagatgcgctacaagcacgcttcacgcgggcgacaaactgatgggagctacaactggcgcttcattgcgctataaactgatgggcgctttatgtgccacaaactgacggatgggcgcttcagtggcgctacaatccagaacgaggagcagcgatataggagctgcagacagaaaactgaattgcgctttacatgcgctgcaaaatctgagctgcagaagagtagcactacaaaaaacgctacaaaaacgatgcgattagccagcccgacaacagcgcttcattgcgctgcgaggcacatgaactgcagaggtacatgagctgcggaacaattcacacctaagatgcactacaaagtggtaagagctgcagaggtacaggagctgcagaccgtttgcgctacaaataaagcagccgtagtgggacatgagctgcggagtacaattcctctgttttcttggagcaggaccccaccctttcaccttttggaatggctcccactctatttttctgcaggacggttctcgcatgatggtgctggtagacaaaatggagccccgggcaaaaattagtgtttaacattctgcccacaccattcccgctatagcagtggagtggaggggcactgattggagtggaaatgggaatcttttggtgatggcagagcaggctgcctgcctacttgtgcttgattgaagtggcggtgtagttgtggtggcgcgaatcagcgtccagcaacagtttgtggaaactgtgggtttgctgagtatggcgggggaattggatctgtggattgctcttgctgcatgaaatgaatctggctttggtgactggtgggaggggtttgggaggggggattctggcggcggggggggggggtgtgcagatactctgcagccctgtagcagccagtctcaggcctgccccgcccatcctagtgtgccttctctgcggtgcttagcgcctcctcctacagcgcctcctcagagcgcgcctcccctgcagcgcgccttcccagagcgcgccttctagatgcggcctcctcaggcccctcctcccagctccttagcgcctgcctgcccaggccccacctctctctggccacctcattctgaggtgagctgctcaggccccgcctcttccaggcccgccttttctgtggtgagctgcccaggccctgcctctcccgggcccacctactctgaggtgaactgtccaggccccgcctctcccggggccgccccctctgaggtgaactgcccaggccccacctctcctgggcccgcctcctctgaggtgaactgcccaggccccgcctctcctgggcccgcctcctctgaggtgaactgcccagaccccacctctcctgggcccgcctcctctgaggtgaactgcccaggccccgcctctcctgggcccgcctcctctgaggtgaactgcccaggccccgcctctcctgggcccgcctcctctgatgtgagctcacccagatcccacctccccaggcccgcctcctcttaggtagcctgctcaggccccgcctctccaaggcttggcccctccctaagcctgcctctgccgggctggcctatagtcccacctccctcagagccggctagcacacatgcgcagtgtgaaccctcagcccctcccttcaggcgccggtcctctgcacctgcgcaccttccttgcctgagccctggctgtacagccccgcccccctgc

SEQ ID NO: 1237 - DNA, 118 bp, Homo sapiens
gctgccatggaaagtagcattcgcaggctccagggatcaggccgtgcctatctttgccgtgcccattttccagcccgtggaaggtacaaccgaggtcttctcgagctgatttaccccc

SEQ ID NO: 1238 - DNA, 271 bp, Homo sapiens
ggttggttgaatctgcagatgtggaactcatagatacagagcaccagctgcagtgggaagcaagtgaaccatctggcgtggagctgagccttgggggagccgcagtgcacctgcttgattagattagcatagcgccatccggtcagatcgttcttcacactgcagggcagcctgggaaaaataagtgacaaatacaaatcatcagaaactgtagctgagtcggggcagggccctgggaacaggcaaaggtacagattgctgggtagagttc

SEQ ID NO: 1239 - DNA, 1337 bp, Homo sapiens
gaggcacaggttgcagtcagccgagattgccccaccgcacgctagcttgggtgacagagcgagactccgtctcaaaaaaaaaaaaaaagatgtgaccagttcaagagtgctagtgacaatgagaaagcttggtgtttctctattcattcttgtaattgagagagattacaaaatcacgcagaagcctacaggcattcagtgttaaatcaatatattactgtcccttaatctgggaaggtgcccaaattagataaacacaagagtctgcaccttcaaggggaaaaatggattgttccaggtagcaggcacaaactgagttgtttttcaatcaagattttgaattatgctgatccatctacatgccagacctgtgcctccagagccaacagcactggccattcacaacctgttacccacaggcaggggtgcaatctgtgagtgtgttgctgaccaacgcttgctaatccacacccctccactttcgcttcattggaaccccgctgtaacaagagtctgcagtgtatatattctgctgaaggctggggctgctgagctaaggttccttggccaaatcaccagactctcccaggctcttggtgtcctattttcctcatctgtggaacaaggctcatattttatgtctataaaatcaaactctctctatatatatacatatatttaaaatatttgaaagagctttgtaaatgataaagttataatacattatttaaccagctgaggttgcagaagactatctctaacataaaactgcccctggggatatatgagttcgtatgcaatctgtctccaaagtctgttagtaaaatacttaaatacacaataaatggttaataaattcaaaagacaaatcaagcaaagcactataaattgtagacagaattattcagtagtataggcgttagaatgaaatattacttgaatcttatgctggaaatcacatgggtgatattttaatgccagttttatgcatgccctcactggcctccagaataaaagtgctctttaacgattaattatacatacagttcatttccctaataatacttcaatgaaaacactttttatgtgtatgcatttcaacctaaaaagcccagatcaacagtcctccagctatagctatattcttatttacaaagtgtagaaagcaatggaaaaactcactatatccacagctatccatcaccacaaagaaaaagcagaatgaaacaacaaaattaaaggcaaatactgcttttccaaacacagactaaatgttcataaaaatcctctcagtttaccaaactcacaaatactcaaagtaacataatacccctttc

SEQ ID NO: 1240 - DNA, 94 bp, Homo sapiens
gtggtggcgggcgcctgtaatcccagctactcgggaggccgaggcacgaaaatcgcttgaacctgggagaaggaggttgccgtgaaccgggatc

SEQ ID NO: 1241 - DNA, 101 bp, Homo sapiens
ggcaaagcggccagcgcctggactgagaggcggggcccgcagggcgatccaaacgaaggtggacttctccaacagcccaggagtgggtctgtgaccccgcc

SEQ ID NO: 1242 - DNA, 3560 bp, Homo sapiens
gctaggaaattaaaaggaaaattttacaaagtggcagttcttgtctgtcttcccctccagatggcccgtgtgttgttttcgggccggggctatttctcatttatttcgcacccccggttcttagtgccctgtaggtgctaaatcagcatttgtttcatgagtgctttttctgggggcaaccagacccctgcagaagtgtacctgtgttgtgccagaggttctgatgataggcttataggcggtagtttcctcagtgtccgtgggtcgcccccggtcccgggttggatgccccgcggtccagcaccgaacctttcggggtgcagagttgcagagccgcggagggcccgggccgtgcgcagccgaagggaggcctgcagcgccccctctggatgcagcgggcaccggccggccgccccgctcacccgctcgcaccccacgtttgttcaccagtatttcagtttacggtcagaaaatgaacacagacacttcgtgatactctacacttttcaaaggcgtaagggatgccttttaaaggattatggattagaaaaattcctccctctttcttgtgcctctgggcccttgcattgtgattctatcttacgtaaataaagggggctttgctctcctaattgtgcccactgttctgtgcagcgcggaccggcgcatgcagcgagcggggctgcgagggcgctgctgtggccaggcgtctggcatgctgaccacgtcgcgctgctgtaaaggaaacctgccccgcgcagcggcggtggctggagcgggagaaaccggactttgtgcaactttggccatagtggccatcccatgaatctgtttactagcttggtggtgggtccaacagagcttgttgctccctagccgcttgctcgtgcccttggtggttaccggtagttaagcttagggcgcatagggccctcgtggctcgccacctctcacggttcagtacccacgcttcgaacgagggatgggagcaggcgccacggccggcaccccagagccctgctgccccttagttcgagcggccatcctcctgtggggcttgtgggcagcctgtggggtttgtgggcggcctgtggggtttgtgggtggtctaaggaaagagttggggcactcaggggtctgctgtttttgcccgtggccttaactcatcaggggagggtttctgcagcagaatctcgggctcagggttggcggttaacgagggagcagcggggtcttggggagggggctcgacacccctgaaggtgccccctaaaggagccactgttagaggggcaccccatctttgtggccatggcggtggtagagcggctgggaggggctctgcggcgagcaagggagcaggcggtaggggttctgcggcgatgggcgggctaggggcggggcgcgggtgggctctaaaagtcggtgcccactcgctccgcgctgccgcggcaaccagcacaccccggcacctcctctgcggcagctgcgcctcgcaagcgcagtgccgcagcgcacgccggagtggctgtagctgcccggcgcggcgccgccctgcgcgggctgtgggctgcgggctgcgcccccgctgctggccagctctgcacggctgcgggctctgcggcgcccggtgctctgcaacgctgcggcgggcggcatgggataacgcggccatggtgcgccgagatcgcctccgcaggtgagtgtgcggtgggaacgagggggtgtggctggcggccctgggactagggcgcaggcgagcggaggactgtgtgcccgtgtccgagctggggctgcctctgggcgaaaactctaccgacaggcggcacgcattccgcgcccgctctgcctacttgaggagggggtgtcactcctgcccgcaatggaatgttcagaacgcgggacctccttgggttaggatttctagaccccgggatcgtcgtggtgagatttaggatttctggaccccagcgtcatcttgatatgacttaggatccataatgaccctggtctcaccctgatgcgaattgggatttttagatcctggcatcaccctggtgcgatttaggatttttatactcagtcattgctgcagcatgatttaggatttctaacccccagcatcgccctggtttgatttaggatatttagactccggcttccctctggtgcgattcaggattcttagactccgccgttgccgtggcgcgatttaggatttatagatcccggcaaagccctggtgcgatgtaggatttttagaaccccagcatcgctctggtgcgacttaaaggataggccccagcatcgccctggtgcgatgtaggatttttagaaccccggtgtctccgtggcgcaccttaggatttcaagaacgggataatcgcagtgccgagatcgccgcggtgcagcttaggatttcaagacccaggtatcacggtggcgggagtcaccgcagtgactagaactcgcagtgcccgtcagccgccttaagtatttttcagatttcagtaacaagcgcgagtgagaacggcgatgtgaccaaactgtcatgttgcgcagggattgttcaccttggtttcgcgggttttcaaagtggttcgtctcgcggcgacgccatcaggtgggcggcaggttgggtggtattattacgggagtgtgtttttctgtttacaagatgaagaaatcaaggctcagaaatttttggaaagtttgttactggagtttgcttattgtctccgctcatggctcatcaaatagttgggattttggccaaaaaatgtttgcttaacccattttgcctactgacggctaggttgcttcacttctaaaaatcctaaaagttcatgggggcatttttactgaggtaataagacaaaaaatggccccctgagaggttgcctctttgctttcttggagtaagaggaggagggtgtggaggggggtgtccaggagtggagtatgttggtcgatagcctcgttttttaaccccccactttccctgagcagcggcggggaagcctccccatttgccgctctggccgcccctcccggggctctctgctgagtcactgcagagattcagctgctggaaccccggggatgaatgcgatgagaagcactgggggaaaggagtaatgaaatctgcacatgaaaatgtatacattgaagtacaggacagatagggctgggcaaatgatcgtcaaaacctaatggtttttgtcatctgacctttcaaggagatactgggatacagcctgctattgttgggtgaaaactgtgatataaccatcatgttctggcacttttttgaaccatttctagtattaccttgagaagtaggaccaaatggttctatccgtcttatggacaggtactttggagaaaaaaagaaatgactgccctaataatgcctaaaaaatagcctggggagctgacattgtttaagaaacatggttattttaccactgtaaaaccacaggcttgtttttagattttagcaaaaagtatcagggatatgggggggaaaagtatcttgtaagttgaggaagttagcgaac

SEQ ID NO: 1243 - DNA, 141 bp, Homo sapiens
gctgcaaatcagatgacatatgacatgctgcacactccgtccaactctgaagggagtccgtctatggggacaatgggtctggtttatattttaagcagctagagtgaaaaacggggagtgatgaggtaaggccatggcaac

SEQ ID NO: 1244 - DNA, 658 bp, Homo sapiens
ggaaagtggattagcctggcagacagtattaaactcagccgggatccctgggagagtctgccagcaactgctggagtgcccaccacatgtatttaggaattttgcgagggttccaaggcctttcagggcacagccgctctatccctaaggaatcaacacacacatttatcacagaggtagtttagtacctcattgcccaaaggaacggaacagagtgggagcaggaggaggggagttgagcaaacttagagaggaacgggttgtaaagtctgagtcagtttatatctgaaggcaaggctgatagaggtttaattaatttgctttccactctctttgaccataattcaatctttctctctctcttcacattcaaaatccaaggtggacagaggacatagacaggaggggtgatctatgaggctacagacaaagcagaagtcgcctctattgccatgagcaattcaattcctggagctaaaacaataacatcagcatcatcgttagagcagctttgagagtaaatgccaccagctcctacagagcagccccaaattaatggcatataaataaaaaaaggacaccagggtagccagtcccactgaaatgggcaatcaatgtttctattacaacattaaaaaagaggaggaggaggaggagc

SEQ ID NO: 1245 - DNA, 553 bp, Homo sapiens
gtcctgcctccctcgcgcgccccacctagcgcgcgcctaaccctccagcgtccttgagctcccatcgggcacgcgcctaaccctccagcacccctaatcctccatcggacacacccctggccctccatcgggcgtgcgcctaaccctccaacgcccctaatcctccatcgggcacgcctctgacccattgggcgcgtgcctaaccctctggcaccccgtatcctccagcaggcgggcgcctaaccctccagcgcccctaatcctccactgggcaagcccctgaccctttatcgggcgcgcgcgcctaaccctcgagcacccctaatcctccatcaggcgcgcgcctaaccctccagcgcctttaatcctccatcgggcacgcccctgaccctccaccagatgcgcgcctaatctccagcacccccgatcctccatcgggcgcgcgcctaactctccagcgtccctgaccctccatcgggcgcacccctgatcctccatgggtgtgccgctgacccctgatcctctcttgcgcccttcccccctcccccgcacg

SEQ ID NO: 1246 - DNA, 475 bp, Homo sapiens
ggccttgccccggcctttggggcagcgcaggcggcgcagggcggcggcgatggcgccataggaggccaggatgagcaccgagggcagcagcagcagcaccaggcaggcgcccagcagaggcagctcgtcggcgtagctccgcgtgcaggccaggtgcagcagcgccgtgatgtcgcagaagaagtgcagcagcaggcgggagccgcagaaaggcaggtggaagatggccaccgtgagccccacggacaccgccagtcccctgaggcagcaggccagagccagtcgcgcgcacagcccgggggtcaccacggccgcgtagcgcaacgggtggcagatggccacgtagcggtcataggccatggcggccagcaggaagcactcggccccgcccagagccacaaacatctgcatctgaaaggcgcagctcaggaaggagatagggctgcccctgcggtggccccggcgtgctcaggtc

SEQ ID NO: 1247 - DNA, 210 bp, Homo sapiens
ggcttagtttgcccaccatagccactctgcttcctgtcataacgccgctttccctgggcatgcagagaatccttgcccttcttgtactgtgtcactttatggggttggtgcttgccacacttcttacagaaagtccgtcgggttttagggacgttaaccatgcttgcgtgagcgctatcggcacggaaagaaagaagccgcgccgcaaac

SEQ ID NO: 1248 - DNA, 331 bp, Homo sapiens
gcggagaaatccccgtgtaatgacctgcgaagcccccttcccaccactcccggcgcgctggcccgcctcacttccatacatcatcgctctcccagctttcgctgactcctcgttttttaagtcttgggaaagcaatgcaatctccatagcaatctggagttcacagaaactgcatttccgggattcatttattcctccgactcactgctggaggctagatcattcctcattttcatgatttcctatccacgctgagaagctcttcaactccagcctgcccaccccgacgtgccatcgaccaggaagcaccgcttggagcacccctttctcc

SEQ ID NO: 1249 - DNA, 44 bp, Homo sapiens
gtgtagccgccccccaccccccacccccccgcgccccgccccac

SEQ ID NO: 1250 - DNA, 334 bp, Homo sapiens
gagaggactctgtggcatcacatcaccccaggcctcccttcacagggcctgcgtctccttttgacgtgtccctctccccagccctccacaggtgctcgtgcctggcaggcatctgtcacctggagccatctcagtgtggggcagggaatagggtactcaagaggctcaactctctcagcatccaagggcttctggaaggcactgaatgtcagactgactgacaaaaacaagccaccaaggaatggaaatgtcgaagccattggacacagagccctggaagctgctgagacgccgtgtttggttggggcttcctcctgtgctgatgattcctatc

SEQ ID NO: 1251 - DNA, 170 bp, Homo sapiens
gagggatttccctgccctccctcttccctcggaggggcggggcggggcggggccgggtgttccatagcatgtgtgtctcggatgcggaaggcagttttgcttgggaaacaagctccttccccggggtcatcactcacggcctccatggcaccagggacaacgctgtcccc

SEQ ID NO: 1252 - DNA, 228 bp, Homo sapiens
gtctcggatgtcctggtggccgcgctggtcatgccgctgagcctggtgcacgagctgtccgggcgccgctggcagctaggtcggaggctgtgccagctttggatcgcgtgcgacgtgctttgctgcacggccagcatctggaacgtgacggccatagccctggaccgctactggtccatcacgcgccacatggaatacacgctccgcacccgcaagtgcgtctccaac

SEQ ID NO: 1253 - DNA, 442 bp, Homo sapiens
gggtggccaggctgggcagaggcgtttcaggatttgatgggaatctttggccttgagctgtctcccctacctgcaaaggccaaggccttccctccactggctgaagttggttgggctctgcccatccatccgagcctgcaaattactcacggggggctgctagtgctgcctgtgcaggctggggccagatgggaacactttgtgggggctggccagcctgggacagcaagcagctgctagattattccaacccctttctgtgttcttcacaccagcaggggctggggaggccgagagccacagcacagcttcagagaggccccttggaggtgttcacaaaccccctgcttcccaggaggggcacccaggtgtagttccagcctagcctcttttcccacgcccgccttctctggggggtgtctctggggggtgtctggtctgc

SEQ ID NO: 1254 - DNA, 242 bp, Homo sapiens
gcctagcacacctgtttattcagcctgagacctgcttctggagctagagaagatgggctggagggaaggggctgctgcagtgggtgggtggccccggccaagtctgtgccgctccctgctccccgcgagaccttgcgccccctccgagacccgctcttccatctgcacagagggagtcgtggtgacaggacgaggtttcccgtggaaccctcgggacagctctggacgctcgggactcggtc

SEQ ID NO: 1255 - DNA, 113 bp, Homo sapiens
ggccaggcctcagagaacgatcacagacagaaaactcacgcaggtcagcggcctcagggagttcaccaccaaccactgagccgttctgtgcgccagaccccggctgagcactc

SEQ ID NO: 1256 - DNA, 51 bp, Homo sapiens
gcctccgggcttcccaaaaatccagacgcaaactgcgcggcctctgcgttc

SEQ ID NO: 1257 - DNA, 288 bp, Homo sapiens
gcgtagtcctcgagtctcggagcgcaggggtcccgagggcaccccgggccgccgtcctgcggcccccccacagtgtgccgggactcggggtctctcaccacgagcagacctcggcgctgctatccggactcctcgagccccttacaggccacatggccaggggcgaccctcccgtcacaactgtgactctgtgagctcacagggctggcctccacattcttgctggtggaagaccacaagcaacgggatgccttggaaagcatcgttctgcagcaggactgctcaacc

SEQ ID NO: 1258 - DNA, 80 bp, Homo sapiens
gcagagcaggagcgcgtgcgtaagaagggcacgcagagcaggagtggcgcgtaagaagggcacgcagagcaggagggtgc

SEQ ID NO: 1259 - DNA, 211 bp, Homo sapiens
ggcctccgaaggtgcctagaagcctgtgagctcagcgcccaggcaggtctcccttcctcaggccgcggagcctcgctctgcacagtagggggcgggctgttcctttccggcctgaggaggcccgtggcttcccgcgccgacgtttgacgtgtggcagggacccggttagcgtttctgcatctcagatggagatgtgtgctgtgcagaggcc

SEQ ID NO: 1260 - DNA, 659 bp, Homo sapiens
ggccgcttcccgtccccctcacccgccaggacctgccggcccagcctcttcacaccccgcggcctctcaccgcgtggctgagcctgggccgccgttcggaccgcgcggcagccttcgattctgtgactctcctcgcctcgaaccccccacggttctcagcataaagcccagactccgtggctggtggaagcagcagctccctggatcggtcctgggcatatttacagcttcgctttttaccctgggatccactgttcgactcgcaacacctttccggagcccggcgcttcactcgcagcctcgcagcctcgcaaacgcccgtccctgcccccgggcgcgtcccagcctcctcgggttcccacgcgctccggggagcccctgccgcaggcgccttctggagcgggtcctgggacccgtttccttcttcccctgggcagcccccgcgggtctttcacagtcgcttccgtccgcgattcctggggctcctgccgctttgtgcccctttgtctcccacagcacacgcctcccaagtgttgacttttgggtcactgggacaaagcgtccccgcgaggggatttgctggccctctgagatttaactggaaacccgtctcagtgggaatcagggcagaaataggcaagggaccttacagacaaaac

SEQ ID NO: 1261 - DNA, 233 bp, Homo sapiens
ggtacccccggcaccggcaagggtggaggacgctgcagggaaccgacgggacccggccgagagccccgactgtgaggaggcggctcacggcgcctacctgggaccgaccctgactgtgaggaggagactcacggcgcctacctgggaccgaccctgactgtgagaaggaggctcatggcgcctgcctgggacgggacccggctgagagccccgactgtgaagaggaggctcac

SEQ ID NO: 1262 - DNA, 111 bp, Homo sapiens
gccgggggtcagcgagcagctgaggagcgggcgaggccgggggtcagtgagcacctgcggaggaggcgctgggagtggggagaggggaccaggaggggcgtgtggggagac

SEQ ID NO: 1263 - DNA, 560 bp, Homo sapiens
gctatgggagactggagtttatttcacctctgcaatctcgaccataagagacaggtacgccccgggggggccagttcagagacctacccctaggtgcacattctctttctcagggaccttccatgctgagaaaaggaattcagcgatatttctcccatttgcttttgaaagaagagaaatatggctctgttccgcccagctcaccggtggtcagagtttaaggttatctctcttattccctgaacaattgctgtcatcctgttcttttttcagggtgcccacatttcatattgctcaaacacacatgctgtacaatttgtgcagttaatgcaattattacagggtcctgagacgatatgcatccttctcggctgacaggattaagagattaaagtaaagacaggcataggaaatcacaagggtactgattggggaagtgataagtgtccatgaaatctttacaatttatgtttagagactgcagtaaagacaggcataagaaattacaaaagtattaatttggggaactaatgaatgtccataaaatcttcacaatccac

SEQ ID NO: 1264 - DNA, 334 bp, Homo sapiens
gcaccctcgcctgatccagcggtacctctccctgcggaggcctctcctgcgcgcaccctcgcctgatccagcggtacctctccctgcggaggcctctcctgcgggcagccgtgcctggcccagcggcatctctccctggcgtcagcagctttcctctccgttcccctccgccccgtggtgtcgtcacttctcggctgctcacgctgcgacgttgttttgttgggtcggatctctgcatcggtctgggcatgggtaactactcaggattaatgtcagaagttgagtttttgttggtgacactgacaagctttgtttccctccctgtgctccacac

SEQ ID NO: 1265 - DNA, 103 bp, Homo sapiens
gcctcccaagagagactttctagttccctctgggatggcatccctggctccgggtgcgcccgcatctgccaggaagactgtctttcaattgaacacagcagcc

SEQ ID NO: 1266 - DNA, 541 bp, Homo sapiens
gtccttgaagaacacccacgttcctcctgttgtttcttctggagtgcggaggcttcgctggtgagtgatgaccccgagacctccgtgcctgggggggcgccagcatgtggggcgggggcgtcttcatgggtctcatttgctttggccgttggagcgtttgcatttgctgccgtttgcttgagtgactgcgcagcaagactctgtgctggagaaagccacgcccctcggggggaggcgccgccgccacgcgcgtgcggcccggagggtgtcgggagcaggggccgcgggcggcagctgacgggcgggcccttccggaggcgccgcgcctggaccgtggccgcaggttgggcagcgccagacgcagagccctgtgccgcttgcgtccccgggcttcctgcccgacaaggacggggggccggacagagagccgtgtcggccgagacccgaatccgggatcaggtttgtgtttctgtggacacgtctgcccacaaagagggcagtgggcaattgttctcttcaccagagaatggtttttgtcaac

SEQ ID NO: 1267 - DNA, 181 bp, Homo sapiens
gcggccgccctacctgctgagccccgccgacagctgccccggggggcgccaccgctgctcgccgcgcagctcggtgcactcggagtgcgtgatgatgccggtggtgctgggcgaccacgtgtccagcagcaccttcccgcggatgcactacagctcgcactacgacacgcgcgacgactgc

SEQ ID NO: 1268 - DNA, 56 bp, Homo sapiens
ggggtgcagcgttctaacgagatggggtgcagcgttctaacgagacggggtgcagc

SEQ ID NO: 1269 - DNA, 123 bp, Homo sapiens
gttgttgaggtggttctgagaggtgacagcgtgctggcaggcctggcaggcctggctcgctctccgcgcctcctcggccttggcgcccattctggccgcgcttgagcatcccttcagcccgtc

SEQ ID NO: 1270 - DNA, 198 bp, Homo sapiens
gttacccggtatcgtggtctacacctcgcccacaaatccatcccaggctgtatcctcatggaagctttttccagatgtgcttgagggttaagatcgcaatgtgcaagaagaaaaagtgcacattggaaaaccttctcttcggagatatctatatctatatttatatatatttacagatatggagatatatacacacac

SEQ ID NO: 1271 - DNA, 100 bp, Homo sapiens
gccgcctgcccagcaccgcaagcccaagcccaagcccaaggtcggcttccccatgccgcggccgcggcccaaggcctacaccaactcggtggacgtcctc

SEQ ID NO: 1272 - DNA, 225 bp, Homo sapiens
ggaggctgggcagggcagtgccgggggagtactcacccctgtcctccttctcccccagcgccccccggctgccgcttctcttctccggcagggcgttctggtcccgggagagggagctcagaaggaagcccgggtccacgcgcttgcacagccgcttggcctgcttcttcctgcgcggccggtacttgtagttggggtagtcctgcatgtgctgcaggcgcagcc

SEQ ID NO: 1273 - DNA, 168 bp, Homo sapiens
gaccataagagacaggtacgccccggggggccagttcagagacctacccctaggtgcgcattctctttctcagggacgttccatgctgagaaaaggaattcagcgatatttctcccatttgcttttgaaagaagagaaatatggttctgttctgcctggctcaccagc

SEQ ID NO: 1274 - DNA, 300 bp, Homo sapiens
ggagggtcctacgcccacggagtctcgctcattgctagcactgcagtctgagatcaaactgcaaggcggcagcgaggctgggggaggggcgcccgccattgcccaggcttgattaggtaaacaaagcagccgggaagctccaactgggtggagcccaccacagctcaaggaggcctgcctgcctctgtaggctccatctctgggggcagggcacagacaaacaaaaagacagcagtaacctctgcagacttaaatgtccctgtctgacagctttgaagagagcagtggttctcccagcac

SEQ ID NO: 1275 - DNA, 139 bp, Homo sapiens
gcgatctcggttcactgcaacctccgtctcccggattcaagcaatcatcctccctcagctccccacacccctccgagtagctgggattacaggtgcgcgccaccatgcgcggctaatattttgtatttttagtagagac

SEQ ID NO: 1276 - DNA, 185 bp, Homo sapiens
gagcacatgggaccgcacactggggtgggactggacgagcttctagggctgggcggggggaaggggagggctcccggctgcctcctcaccatctggagaaagcggcggatgcgctgggcgtcctgtgcccggaacacgtgccacacagtgctgacctggctgcccggagaccagagcccctcccc

SEQ ID NO: 1277 - DNA, 976 bp, Homo sapiens
gaatgcctgccctacaaggttaggccctcagtgcccagtgcctgttcaggttgcagcctgcaaagatgtcccctgtcatcctcgatgatggtggcagatggagtccagggttctgtggcaggaggggacaaccctgggtgtggagcaggagtggggtgttggagtggctgctttgtaaatgaattctcccttccggttgccaagccttagaatagaaaaaagttttcctccttcccttcctccctcctggtttcctccctcctggtttcctctctccctcctgaacaggagctgaaggtgtttgtctgttttattggcgggctcaggtgagattgccaagggcctaattacctgaactctaagccctgaacttgctggggagcgagtaggcactgattcagggcgtcctcatcctggagatggtgaaaggcaggccggctcctctgcagcagagccagggctgccagcccctggccgctctctcctatggagtccaactcatcagctgcacttatggggactgctgctgcttgttatgggcatgggcatgtttgtcttgattaaggacaaaggaggaaggagatgtggccactgaaatccactgtagaaaaatgcaaagttacagctgtcttggtccttttttctgtagtcacctctgccctctgaactttagctgccccgtttgctaaagatatctagtccttctctgatatcttataataaagaactccccataccctgaattaattcagtctgcggtgtgagcaatctaactaatgcattgcccttctcagagggtgtttgcattttaaaagaaaacgcttaggggtggtaatatataacccagaggaatcaagcccaatactcagcgtggtgcctggaaagtggtaggtgctcatgaatgctggtgagatgacatctggttgtggcatatcagagtcaaggagtgggagacttggggtgcagagagtatctc

SEQ ID NO: 1278 - DNA, 259 bp, Homo sapiens
gtgcccttagtgctgtctgtggccctccccagggcccctcggcctcccagaaaggtcacattgggtcacgagctgctcccagaagcacccccgaccccatggctgtaatctctaaacacacagtggagggactggggaatgggtaaccagggagggggttgtctccacagccgcatgagtgacgttcctgttctctttcctccttcctccagacgccagagaaggaggtcggctaccgtgagtgttcccgcccttcttc

SEQ ID NO: 1279 - DNA, 307 bp, Homo sapiens
gggtgaggagaaatccccacatctttggggggtcacagaagtcttccgtgttgattgttgtggggtgagagcagagaaaaacagtttgtggtttttcctacacattgtatgatcctactgatatggaatatgcagaataggcaaatctatagaaacagaacgtagattagtggttgcaggggcagcgggaaggagggatgggaagtgactgcttaatgatcactgagtttcccttagaggggataagagatctctggaactagacggtgtgatgttacacagatgtgtgaatatactaaaattcacc

SEQ ID NO: 1280 - DNA, 249 bp, Homo sapiens
ggcagagccaacctggccacctacatgggagggtccccggggtaagatgtggctttgtgacctaaggaaggcgggtaggtcgggctgacgggggagaggggccagtgaagcccccatccctagggacacagttcagctgaaggaatctcactctgggccttcacagggttagcatcctgtcggcccctgcgcggggccgggggggcggggattcaggtggcccctggtggcagctgtcttaacccaggc

SEQ ID NO: 1281 - DNA, 485 bp, Homo sapiens
gccgcccccgcccgccgccccccgcccccccgccacacacacagagagagagagagagagagagagagagagaggcatgcaacaattaggggtcaaaagaagaacaaaaagactggaaataaagtgtattttggcttactctatgttgggctgacctaactgcactatcttttatcttttcctttgggactaggacttctgacttctcactcagattctaatctctaccattttctcctcccttcctccctccctcttccctctctttatcagagagaaatagccactcctatttatttctgatcttatttcttcttcctccttcccctgcaattgaatattagatgatagagtggtacagcaagaggcaaaactgcagaacagatggggcagaagagaaggagggggcaggttgacacggcctccaggaagcctgcctaagcacctcccaagctgtgctctgcagctcatagaccatggaacac

SEQ ID NO: 1282 - DNA, 95 bp, Homo sapiens
gaagcccgtaggtggggcccgcgcaggaacggactcctgagagactttccatgtcctgaagcaaactgtgtgttcagtgcctactccgtgtacac

SEQ ID NO: 1283 - DNA, 264 bp, Homo sapiens
gcgcatagggtccttggtctggaccctgccccccaaaagtagggccttgctcctctaccttgctctgagcacggagagccctgaccccaccagtaggctcgcccccagaagggcccaagtggccgtctaccgtcaccttccagactcccgcccctaacacccagtggctacagtgcgcctgtcggggcacctggagcgctcacctggttgaattcaaagtcccagaaggccccgctggcgtgaagccggccccttacattttgc

SEQ ID NO: 1284 - DNA, 578 bp, Homo sapiens
ggctgggattggtagaagagcagcagtccacactttgcacatttctttctgtactgtagttcaatgccttcaggtctccgcagatacatagtctcttcgtcttctgtgttacaaaacttatgggcatgtttggcagcatcaatcacacgggaccggtcccggggcctcatgggcaatttctctaactgacagtccagcactaggaccacctggccgcacaaacagtagtacacatggaggggcttctcgccgtcgtcatattcctcccggtcccgagtgtcagagcagactactgaccgagacactactttcggcatggtttccaggagcaacctgaaaaactctacgcaaagaagagggtcgcgccgaaatgacgtcacgagcgcgccttgcgccttttccctgcggctaccttagtaatacaatttaaatggcatttatcaacatttccataacatataaacatcaatattactaaaacaacttgaaaagtatttctttcacatttttccggtaagctactagcccagggccacaggtttccaccttgacagatataatttggtctgaggaatgac

SEQ ID NO: 1285 - DNA, 186 bp, Homo sapiens
gcctgtaatcccagcactttgggaggccgaggcaggcggatcacgaggtccggaaatcgagaccatcctggctaagacggtgaaaccccgtctctactaaaaatacaaaaaattagccgggcgtggtggggggcgcctgtagtcccagctactcaggaggctgaggcaggagaatggcgtgaaccc

SEQ ID NO: 1286 - DNA, 1363 bp, Homo sapiens
gtcaccaccaggcctgtcctaaaagtgctcttgaaggaagcactaaacatggaaaggaacaaccggtaccagccactgcaaaatcatgccaaaatgtaaagaccatcgatgctaggaagaaactgcatgaactaatgagcaaaataaccagctaacatcataatggcaggatcaaattcacacataacaatattaactttaaatgtaaatggactaaatgctccaattaaaagacacagactggcaaattggataaggagtcaagacccatcagtgtgctgtattcaggaaacccatctcacgtgcagagacacatataggctcaaaataaaaggatggaggaagatctatcaagcaaatggaaaacaaaaaaaggcaggggttgcaatcctagtctctgataaaacagacattaaaccaacaatgatcaaaagagacaaagaaggccattacataatggtaaagggatcaattcaacaagaagagctaactatcctaaatatatatgcacccaatactggagcaccccaattcataaagcaagttctgagtgacctacaaagagacttacactcccacacattaataatgggagactttaacaccccactgtcaacattagacagatcattgagacagaaagtcaataaggatacccaggaattgaactcagctctgcacccagtggacctaatagacatctacagaactctccaccccaaatcaacagagtatacattttttcagcaccacaccacacctattccaaaattgaccacatacttggaagtaaaactctcctcagcaaatgtaaaagaacagaaattataacaaactgtctctcagaccacagtgcaatcaaactagaactcaggattaagaatctcattcaaaaacgctcaactacatggaaactgaacaacctgctcctgaatgactactgggtacataacgaaataaaggcagaaataaagatgttctttgaaaccaacgagaacaaagacacaacataccagaatctctgggacgcactcaaagcagtgtgtagagggaaatttatagcactaaatgcccacaagggaaagcaggaaagattgaaaattgacaccctaacatcacaattaaaagaactagaaaagcaagagcaaacacattcaaaagctagcagaaggcaagaaataactaaaatcagagcagaactgaaggaaatagagacacaaaaaactcttcaaaaaattaatgaatccaggagctggttttttgaaaggatcaacaaaattgatagaccgctagcaagactaataagaaaagagagaagaatcaaatagatgcaataaaaaatgataaaggggatatcaccacc

SEQ ID NO: 1287 - DNA, 874 bp, Homo sapiens
gaggtcaggagatcgagaccatcttggctaacatggtgaaatcccgtctgtactaaaaatacaaaaaattaggcaggcttggtggcgggtgtctgtagtcccagctacttgggaagctgaggcaggagaatggtgtgaacctgggaggtggagcttgaagtgagccaagattgtgccactgcactccagcctgggtgacagagcaagactctatctcaaaaaaaagctagaaagaagatttctgtgaaactgttttgtgataggtggattcatatcacagagttaaacctttcatttgattcagcaggttgaaaacactctttttaagagcatctacaaaggaacatttgggagccctttgaggcctgtggggaaaaactgaatatcctaagatagaaacttgaaagaagttatgtgtgaaactgatgggatgtgtggattcatctcacagagataaactattcttttgattaagcagcttgggaacactatttttgctgaaactgtgaagggacatttaacagcccatttaggtctttggggaaaaaccaaatatccccagaagaaaattagaaagaacctatctgtgaaactgttttgtgatatgtggattcacctcacagagcttaaactttcctttgattcagcaggttggaaacactctttttggagaatctgtaatgggacttttgggagcccattcaggcctatgggaaaaaaacacaaaatatccccagatgaaaactacaaggaagctatctttgaaactgttttatgtaggtgtggattcatctcacacagttaaaactttcttttgattaagcaggtgggaaagactctttttggagaatctgtgaagggatatttgaagttc

SEQ ID NO: 1288 - DNA, 157 bp, Homo sapiens
gggggtaccaggacctccaggcaggagacggccctggaccacccaggccagcgcagagccctggcgctgatccttcagagccaggatggagccgggatgggaggagatcgggggacgctgcgccacaggctttgagacgaggaaggagccaggaccc

SEQ ID NO: 1289 - DNA, 350 bp, Homo sapiens
gcgcggcgcccagcccctggtttctaaaccccattctgtcgtcccgggacgaatgtcttgggatgtctggctgggtccagggcaaacatcctgcagtgacaaaatgtgtgaaagtgaagttgagcaacaagaggaacagcatagcagcagattgtaacccaacagataaagacattgtctgagtcaatgcgtacagacccattattctccgtgagggaagtgcgcgtcttccctagccgctactgtcctctttctgcgccgccgggctgggctcagtccgcagtgacccagtctcgtgtaggtgggaccagcatcttcaccggccgaggagacgcccctggaccacctgc

SEQ ID NO: 1290 - DNA, 98 bp, Homo sapiens
gtacctcgagggaattaattttaatatacgagataataattaaagcatgattggccggggcgcagagcagcaggtccgctttgtctccccggggcgcc

SEQ ID NO: 1291 - DNA, 206 bp, Homo sapiens
gatctgcccaactcggcctcccaaaattctgggattacaggcgtgagccaccgcgcccagccgcacacattttctatttacagtcatacagaggagtttctccccccaagcccccattgggatcgcattttcctactattctgaaacttgctttttcagtttagagtacacatttggcggtcttgtattcctagaagatggacttc

SEQ ID NO: 1292 - DNA, 188 bp, Homo sapiens
gtggttggctttctgggcacgctgggcctgagccgccccagctcccggggcgcgcaccgggttccacgggtaccgtggacggcggggcgctgcgccctccctgcctcctgcacttgctgcgctggggccgaggaggtggctctgcctttcttgattccccagtctctggaagacaagccgccctcgcc

SEQ ID NO: 1293 - DNA, 557 bp, Homo sapiens
ggtactgccagagcaggggggcctgggagaggtgtggggattggggccggtctctcggtgccctcctcccgccgccgggaattctgcgtgtccacgtaccttctgtgtgttgggggaggggttcctatgtgtatataatccatttgccccaaacttcataaaagtaatccatttgagctccaaagttgatgcagacatcaactttgtgcagcagatttttagaagacaatgccataggagggttcctaactctccttgaaagctcaagacttaagggtttggcagtttgtaatttgggtaaaaatactgttcactgagagttgaacagggaggcgaagacaactttgttttttcccgggagagccctcgctcggaagtgcctcctccctccttctgcggcttgcgccccaagaccttcatccgccgccggggccggggtgggccgggcgttggtgccggcgacagcccccggggaaggtcttcatacagacttgagggtgtgcgtgctggtccctgccctccgccgcagcggggctgggactcagcagtcgggtccc

SEQ ID NO: 1294 - DNA, 353 bp, Homo sapiens
gcctaattcgggcggccggcccttcagctgcaggaggggggaaccagtggctcagccccatgtaggcggctgcacagtgcccagcactcaagacctcgcgctcaaaagagggcacaggaggagcagctgcagggggcagcgtcgttaggcgggccctgagacagctgggaccgcgcgctcggctctagggagctcggccagtccacaggcgtctcagcagcagctgccacctgcatgcggtgccggcgagtgctcggctcagggcggtttctggccacacgcagtttctggccacgcgcaaggcggttgccttttgaggtcccatgggcgctggggcccaactgctctgctcc

SEQ ID NO: 1295 - DNA, 424 bp, Homo sapiens
gttttctttctttgtagaaagatagcagacataaataatcttcaataaaaaggcagttaagaaaaaaggcatgccttcattccaaaaccccagattcagactcccagggctgcttagggggagcgctggggcagagccaggcctcggcgggcggggtgggccgggctgggccgcgcttccgggatgggtcagcgcccggagcccgcgcgaggacatgaggacggcgagcgggccccccggggggcggggcatcccctgggccagacgcagggcggagcggggtcatcgctggcacgcggaaggccctcataaggccctcgctgccggcaccgtggcctcccacccactcggggcgctcgcttcacctcatgcccgcctcagtggctcggggccggagctgcggccacttcctgaccggaaggcc

SEQ ID NO: 1296 - DNA, 163 bp, Homo sapiens
gttggtctctgggacaccttaaaaaaaatcttccttctgtgaccttatgtacaagggtaaagaccagctttctacatccaactcgcgagtgctgaagggaggacgagccgtggggcgcccagccggagcctctgtcctctgcctgttcccgattccatggccc

SEQ ID NO: 1297 - DNA, 309 bp, Homo sapiens
gccaggggcctcccacttattctacacctctcatgtctcttcaccatgccagactagagtcaagctcaacagggtcttctttccccgctgattccgccaagcccgttcccttggctgtggtttcgctggatagtaggtagggacagtgggaatctcgttcatccattcatgcgcgtcactaattagatgacgaggcatttggctaccttaagagagtcatagttactcccaccatttacctgtgcttcattgaatttcttcaatttgacattcagagcactgggcagaaatcacatcgcgtcaacaccc

SEQ ID NO: 1298 - DNA, 325 bp, Homo sapiens
gctctaagtgcagacaattggtttatctgtttcactctgttagaccagaaggcttctcaacccccagaactcttaaatagttatccaacgactaccagatacagtcattcggctatttggttctaaacaaaatctacggaaaggtccaagtgaaacggcacacattccaaattgtcctgattttaggcagctgcccgatcttgtgccagatgatacagatactttttgagtaggtttccctggactgcagttgcccgtccaggagcaagaattcggttggacaaacaagcaaacaaaatagataaagcaggcgctgtgtgggcgc

SEQ ID NO: 1299 - DNA, 503 bp, Homo sapiens
gtgacccacccgtgctggccagagctgcattaaccaggtcccgcccgcacaggagaaattcctttcattcatcaacagataaggagttttgacaagactctctggggagcaaaagggagaaaatacacacacacacacacacacacacacacacacacacacacacacacacacacaagattgccctgtaatattgagaaacacaaagtaaagggaccaaaaaaagactgaaggaagctttaaggcggccagggcagacagggagtctgctatcagaattaaacgcgatgcagtccagagccctgctctctgtttctacctgcttcttctcaatgtcactgtcggccaagagtttgataaaaaacagatccccagaagtattccagtaactcctcaggaccaccagggcaaaaacaaaaacattcagggcttgacacttaccagggcaacttgccaagcttatcacatgtgaaaagagctgctcagagagaataatcttgctc

SEQ ID NO: 1300 - DNA, 945 bp, Homo sapiens
gccccccaccgagctggctgggtgggaacccttagctcctgggcacagctgctgtggtccctgcacgttcctggaggcccaaaaagccctctgcctccacaggcttgaaagtgcctgctcctgctccctgacctctccccactcccaatgcctgccccagggtggagcaaagttgtggccaagcccgggcactgttgcaacccagccgggtgtgcatgagctcaggggagtgctgacataccagccccctgctgcctcggccccctccggacttggggcaccaacaagcgccagagggaggctgccgaatggggagggtgctgagggcggcttggcacaggccagcaggcacctctcagtgcagacagcctaggcgagtggacatgttaaaggcagaggagttcctaggcaaggtagggcaggtcctctgtgaaacccccaccttcaggtaggggacagcctgaagcctggggcgcgggctgtcagttccaggtgaagtccgccgcctggagtgagagcttcattgatgacggttcagccaatcggatggtggtttttccaggcccgcccatggctacccatggaccaatcagcatgcacttcctccattctgcgtacacgaaaaccctcacactcagtcagactcacaccctcaccgggaagacctgctggagaaggtagctatgcacttcaggtctcctgagagctgttctgtcactcagtgaagctcctctcttgccttgctcagcctctagttgtctgcatacctcattcctcctggatgcaggacaagaactcgggacccaccaaatggcaggactgaaaaagctgtaacacaaacagggctgaaacactccccctgttggccactttgtgggtgacgacgagaagagctgtggcccttctgggaggccagacttcggggctgagccagggctgtggcac

SEQ ID NO: 1301 - DNA, 434 bp, Homo sapiens
gctggagtttgaatatgcttctgatattgcatgacaacttgtaactgttcacttactccactaaccacaagatgcaccagcttgctggctgtgtattttggcagccccagcccccaactcagcccaagggctcatgaatgtaaaccgaatgaaagagtgaatattgtttaatgcagagaggaagatgacgtctacggcatagcatgtgacaccggaagtgggtccttcctgccctgctctggccttcctttcccaccccgctgggtttgcatctgcaggtgggagcgatgtgggaaggcttgtggaggagcagctcagaaaacagacaggacagggagtccttcctaaaggtcatcgggaggagaagccgaggtcccgctgggtctggtacatgcgagacccccagggtattcgcagaccccccccccccctcc

SEQ ID NO: 1302 - DNA, 983 bp, Homo sapiens
gaccggggtttctgcttgtttgtttgttgctcgtcttgtttttgtttgtttgttttgttttggtagagacaggatctcactatgttgcccacgctgatctgggactcctggccctaagtgatccttccatcttggccttccaaagtgttgggattataggcatgagccattgtgcccagccttgttgttatttttgaagcctgaatggaggctctttgtaccctccaacttgtgacctggaagggacacagagcaaagaactgtcctcactggccaagggggacagagtgcttacagctttgggtcattacagctgttccttgccagctctttgatttcatctccctatcgttttctgctttgtttgcatcctttctctttcaaactatgccacatcgtgacaccatctgaaaacaaaagtatcttcccccagatctcttgaaaaaagaaggaaaagaaagaaataggtagaaagttaacccagtggagactagggcagtgtcactgttcttggacctccagatactacagttctgtaggcaaagactgcagcaaaagaaatcacacaccagcttactcggcagccagatcagactgggtggagattgcaggctgtcccagcagggtcaggcctacagctgaccagctccacctgcctgcttctctcttccaatatgccattctgaagcttgggttcctctgcattttcatcctctttgccttgcagtctgctgttcacatgcaggggttactatggtaataggaaaaccctgtcgtgttaacaattttttacggagagagtttaggcagaagcatcaaactggtgtgtttatctttttatggggatagaagcctgtgttctgagtttccaagggagtcagaggagttctggtctacccacaactgtccaaaccacctggaaatgggtcattgcctgggccactgggtggggatggactgccagccctgggtgaatcagaaac

SEQ ID NO: 1303 - DNA, 231 bp, Homo sapiens
gtgcgctgtgtgctccgtgcgctgtgtggtccgtgctcgctgtgtgctgtgcacgcggtgcgctctgtgctgtgttgcatgctctgtgctgtgtgcgctgtgctgtgtgcgctgtgctgtgtgctctgtgctgtgctccgtgcgctgtgtgctgcgcgtgtgtgctctgtgctgtgctccgtgcgctgtgtgctttgttgtgcgctgtgttctacgtgctctgtgctgtgc

SEQ ID NO: 1304 - DNA, 281 bp, Homo sapiens
gagagtaaacaactcccagggggcccgtctgcagcgcctaggggaggggagaggccgggagccgcctccgggggtctcgcggggccgccgctgggacagatgagtcggagacaggccaagccggaacctcgctgggtaaggaacaggaccggagcgcgctccgggtgggagaggcttgcgctcctgcagccccttcccagggcctgcgctgactcatggcgcgcactggagcccctgcagtcgccgtcatttaccagctggcgccccgtcccgctctgcgc

SEQ ID NO: 1305 - DNA, 682 bp, Homo sapiens
gtgtgaaggcgctgggtttccctctgagccaaagcggcgggagctgccccgacttggggcttttttttttttttttttttttttttgccagaaagaataaacattaacacacatatcactgggggcaggcgtgccctggcagaagggcacattgtgtgactggcagcctgccctctctggctttcagttttatatttctcaatttctaattgacttgcagcagcactgggaggagttttgcttcatttctgtattacataagattggacggcctgagggcatatgggctgtggagttctctggagcccaggcttggagtgagtagagctattcccaaagctgcctttatgcatgaggaggggagaaaagaggacagcaactgtaagctttctcctcttctctgccattttccctcagaggccatgcagtgaaagatgctccatagaccctgttcctcctaatgccagatgcaaagcacatgtgttgtcaaactaggattagtttgttatttctcctttaagtaggttaagctttttaaagcaggggtaattaagattatgactagacaatgaatgaaagaaatcatgcggcttaatgagggtactgtagttaccctagaatggaaaggataacaagcttgcttttattggtatgagaaaaggaaaaggaaaaaagagatggc

SEQ ID NO: 1306 - DNA, 200 bp, Homo sapiens
ggcactgctggggcacccagtacaccctccgcagccgctggcccaggtgctaagcccctcattgcccgaggccggcagggcctgccggctgctccgagtgcggggcccgccaagcctacgcccacccggaactccagctggcccacaagcgccgcgcgcagcccgggttcccgctcgcgcctctccctacacacttcccc

SEQ ID NO: 1307 - DNA, 393 bp, Homo sapiens
ggctggaggcaagcaacaagaatgatttaataaaagtgcaattgaaacgcaaggcaaaggagagaaagtgagaaaggcaggccaggcagcagctaaatgtttgaaaccaaggcttttatgtctttgaaacagaatccaggaaaattgctgcaccctctgtagatggctggagggctttttcctctggatggttgcttcgtttgggagcctccaatctcttgtctcacaggttgggagtgtagccctgaagtctctgtgcagcagggtgtgtgtgaatcagtcttgggagctggcacggccctgggcctcgcgtggagtccaggccaggctctgacacactgaggagagttgaaacgagagtgggtgtttgctgacaagcagcttcatgggaac

SEQ ID NO: 1308 - DNA, 24 bp, Homo sapiens
ggggcggcgggcgcggggcggggc

SEQ ID NO: 1309 - DNA, 2933 bp, Homo sapiens
ggcttcagcagcaccaggcaatccgcagggtaaggacgcctgccggggtcctccacagctatctgcagggtagggaacgctcagctaggtctcagtgcaggggattcagcagcgctgagatcagcggggtaaagagctcgcccgggtcatccgcagccatccacagcggagaacactcagcctagatctcagcgcgaggcttcagcattcctgcgatctccagagccacccagatcctccgcagcctaccacaggggaagacacccagctaggtctccgtgcgcggcttcagcagcggcgcaatccacagggtaaagagtccgcccaggtcctccgcaggcttccgcaggggaggacactcagctaggtcttcaagcgcggcttcagcagcaccaggcgatccgcaggctaaaaacgccccccagggttctccgctgccatccgcagggcaggaacacccggctaggtctctgtacagttcccgcagcaccaccttccacagtataatgacgcccgcccccgcagtataatgacgcccgcccgggttctccgcagccgtccactgggtggggacacccagttaggtctcagtgcatggcttcagcatccccgcgatgcacaaagtaacgacgcctcctccctcctctcatcctctgcagccgtccgcagaggacgacaccagctaggtctcagtgcgcagctgcggcattcctgctatgcacaaagtaatgacgcccacccaggtcctccgcagctgtccgcaggggaagacaccagctagatgtaagtgcgcagctgcagcaatcccgcgatccacaaagtaatgacgcccgcccagatcctccgcagccgtgcacaggggaggacacccaggtaggtctcagtgcgcagctacagcattcccgcgatccacaaagtaacaacgtccgcccagatcctccacagccgtgcacaggggaggacacccagctacgtctcagtgcggggctttagcagcgctaggccattcacagggtaaacacgcccaccggggttctccgtcgccaccgcagggtaagacactcagctaggtctcagtgcgcagctgcaggagtgccgcagtccgcagggtactgacgccctccgtgatcctgcgcagccttccgcaggggagacacccagctaggtctctgcgcagctgcaggagtgccgcagtccgcagggtactgacgctctcctgaatcttccgcagcgttctgcaagggagacacccagcgaggtctctgcgcaactgcagtagtgccgcaatccgcaggctactgacgccctccagagttctccgcagccttccgcaggggagacaggtctcagcgagcagctgcaggagtgccgcaatcctcagggtactgaagcccacccgggttctccacagccttccacaggggacgacgcacagctaggtctcagctgcttcagtatcccgggatccacaaagtaatgacgttcgcccagatcctccgcagccgtccgcagggaagacactcagctaggtctcagtgcgcagctgcaggagtgccgcagtctacagggtactgacccccgcccgggtcccccacagccttctgcaagggagacacccagctaggtctctgcacagctgcaggagtgccgcaatccacagggtactgacacccgcccgggtctctgcagccttccacagggtaggaacacccagctaggtctcagtgcgcggcttcagcatccccgtgacgcgcagggtactgatgcccacgctggtcctccgcagccttctccaggggaggacacccagctaggtctctgcgcagctgcaggagtgccacaatcctcagggtactgacgctcacccaggtcctccgcagccttccgcaggggagatacccagctaggtctcagcgcgcagcttcagcatccccgcgatccgcagagtattgacgcccacccgggtcctccgcagcctagagcaagggactgcggaacgagtgccgcaatcttcagggtattgacgcccacccgggtcctccgcagccaagagcaagggactgcggaaggagtgccgcaatcttcagggtattgacgcccacccgggtcctccgcagcctagagcagggaactgcggaaagagtgccacaatcctcagggtattgacgcccacccaagtcctccgcagccttccgcaggggagatacgcagctaggtctcagtgcgcagcttcagcatccctacaatccgcagggtactgatgcccaccaaggtcctccgcagccgtcagcagggtagcgacacccagccaggtctcagcgcatggcttcaggagtgcctcaattcacagggtactgacggtcacccaggtcttctactgctgtatgcagggtcgggacacccagctacgtctcggttcgcgacttcagccgcaacatgatccgcgtagtaaggacgcctgcccgcccaggtcttccatgtaccgctgcggctctggcgcagactgcagcgtaaacacccctggtcgtacgttcggccccgccctcagcccctcccttcctgggcaccattggggcctccttgttggcagggctgtgctcgcaccggatccgaagcggactctgcattcaggctcacgcgctctggaagggaagggcgctggagatgagggtggccgtgcgtctgcgagctgtgaagcctgtgtttgtgactgtaatctcactcacgggtgacagggccctgaggatgactccgtgtcctagactgcgggtattaacatggggcctcttccgtgcctttccgaggcgaaagcctgggtgggttcggaggcgtcagcgctaaaatcctataggctaagttacagggccttctcgctttattaactaaaggactagtaacagcctcagagcgctccctggaggactatatgtgac

SEQ ID NO: 1310 - DNA, 285 bp, Homo sapiens
gaaggaagggcacaccagggggctgaaggaggcacgcaaggagagggcacacaagggggccgaagggggcgcgcgagggaagggcgcgcgagggaagggcacacagcggggccgatgggggcgcgcgagggaagggcacacagcggggccgatgggggcgcgcgagggaagggcacacaggggggccgaagggggcgcgcgagggaaggcagacgaccctggcagaggttccgcttcagagcggaaggttgcttggcttggctgggctgagctgagctgcacatc

SEQ ID NO: 1311 - DNA, 242 bp, Homo sapiens
gtggctccagggttgtggctctgctagaaatctcgatggatcttggctttggtaaaagtgaggctcccatccccaacccagtccgggcccacacagcgtcctgggtagcagcgtccacccgctgcgcgaggaggcagagggcagagttgcttacattgacttctaaaagccccattcgttctccgcgagagacgcactccctaactcatgctggaacgcagagggatgatttttaataaacc

SEQ ID NO: 1312 - DNA, 132 bp, Homo sapiens
gcgcggaggctgcgaaggttccagaagggcggggagggggcgccgcgcgctgaccctccctgggcaccgctggggacgatggcgctgctcgccttgctgctggtcgtggccctaccgcgggtgtggacagac

SEQ ID NO: 1313 - DNA, 242 bp, Homo sapiens
ggaataaattctttttgattgttggaagtgggagccggcacctgcctgggtgagaccttggggcagcttcctgtccccgaggacccgctgcgggatgggggtgatggggctgctccaccaagacctgccatacagggccacggggtccctggggtctggcgggcggcccgagtgtcgtaggggaggatctgaggcctggaggtgtcctgacttgcccaaagctgataccccaccatcaacac

SEQ ID NO: 1314 - DNA, 211 bp, Homo sapiens
ggattaatttgggaaggacaatgtttatattaaccattcatttatcgacgtctgcttgctgggtcaatggccaaatttattgtctcacaagatgggccgcgtcgagccgcgtgcagccttcaccctcccctgccagccggggcagtcggccgctgtcaatacgcagaccgctgaccttgggcctgcagtctgctgggggctgggatctccc

SEQ ID NO: 1315 - DNA, 207 bp, Homo sapiens
gccccaccgcctgacccgcctccaaggcgatggcagcccccaccctgctccagagaagacgcgtggacaaggtgaggaggagaccagagccttcctcccagactcgcagagccacccccgcgcgagccctccgcaccacccgcacctcctgagctctcaggtatggtggtgccagggcggtgcaccaagcaccctcagatgtgctgc

SEQ ID NO: 1316 - DNA, 317 bp, Homo sapiens
gaagcttctcgaacaggccttgcgggcgcgccggcgtgagctgcgggtcccactggtactgctgctggtagagctggtcacggtggaagtggctggtctggaagcggaagtcgtcgccgtggctgaggaacgtctgccgcgacacctgccgcgcggccgcgaagttctccacggcgcccgcgccctcggtcgcgaagctgtgccgcttgaaggcgtccatctccaggtgccgcgcctggaagaagccccgcgcgcccgcgagctccccagccggcccggcctcggcctccaggcgccgcgagagcggccgcagcccc

SEQ ID NO: 1317 - DNA, 48 bp, Homo sapiens
gggccgagctcggcgccagccccaacagcaaggtgggcgccgtgggcc

SEQ ID NO: 1318 - DNA, 200 bp, Homo sapiens
ggcacagccctggccacagactgcagctcgcctcccgctccggtctccctggctgtggcccactgtcctaaggcgagtgggagcttgggttcccccgccgggggcggggcggggaggggggtttccttcccaggcagtgacacaccctcgggtggttcccctgccaccacagggccccacccacctctcaaactcgctgc

SEQ ID NO: 1319 - DNA, 209 bp, Homo sapiens
gcctgggcctcccaaagtgttgggattacaggcgtgagccaccgcgcccggccagcagcttcatttattaggggcttcggtgagggtggggaaaggcagcgccagggtcagaggcgccgaaagaagagcttggagccgtggtccagcgtgcactcgccggggcccggccgactgggctgcagctggcgcagggcgtccctgtcctcagc

SEQ ID NO: 1320 - DNA, 1002 bp, Homo sapiens
gtccatcaatggaagaaaagtagtatcctttcagcaaattgtctgggtttcattgccattgtaaaccaaaaacaaaattatagctcccgcaattgacttgtatgtaccctcctctcagccaaggcattccaaattaaacttgaaaaactagttcaggccatgatggaaggggggaagggtgtccagacatacctaaatgtagcctcctacctttggaattcaggcacaattgatcagcattaacattaaaacagagatcttaagaatgacaaagcagactctttgtaccaataagataccgaactccaacctaactctaacatagcattgcatagcagatagcaagccctggaagaaattgaagtattttatcccaaaataaaattttttgacatattttgaaatgcactgcaaagctctctctcgggagaaaaaaatctacatgctatagagaaaccccttccctttccagagcttttcctaatccaacagatattaattaagaaactggtacctttttagatctgaaaagagactaataccatccattctttctgaagactgctacctagagacttcatctgcataagaaccttggtctccacacccccttatcttaaccaaaacattcctttctattgattccagattttttgataattgccagttagaaaagctttgaatccacctatgatctggaagcccccttcaagttgtcccatgtgtcaggtcctggagtcctggtccagcccatgctgaagtctgaggggagtgggtggatgggcagaaagaacactcaggggctataggcaggtgaatatggttttattcagcggcagctctcttacacagcttacttaaactagctttctcattagcagcttactttcacactgtccaccctatcttggctgcttgagccagcagcctgcatgcacagcacacagccagcttttacttgccttcagggtcagcagcttaactctttctttctctgagcac

SEQ ID NO: 1321 - DNA, 425 bp, Homo sapiens
gggcgcccctcccgcagcctcgctgccgccttgcaggttgatctcagactgctgtgctagcaatcagtgagactccgtgggcgtaggactctccaagccaggtgcggaatataatctcgtggtgcgccgttttttaagcccgtcggaaaagcgcagtattcgggtgggagtgacccgattttctaggtgccgtctgtcacccctttctttgactcggaaagggaactccctgaccccttgcgcttcccaggtgaggcaatgcctcgccctgcttcggctcgcgcacggtgcatgcacccactgacctgcgcccactgtctggcactccctagtgagatgaactcggtatctcagatggaaatgcagaaatcaccgtcttctccatcgctcacgctgggagctgtagaccggagctgttcctattc

SEQ ID NO: 1322 - DNA, 3535 bp, Homo sapiens
gtacattatatgtctacacacacatatgtgggggagagaaagagagggagggagagagagagagagagagagagaaagagaaagagagaaaatacttattttaaggaattgtctcagaaaatggtgggggttgacaaattggagacccagggaagagttgttgttgcaagacttgaatccaaaggcaatctggaagcagaatttcttcttccttgagggacctcagtcatttctcttaagctcttcaactgcttggatgaggaccacccatattattgaggataatctgctttttcaagtctactgacttaaatgttaatcatatctaaaaaatacctccacagcaatatttagactggtgtttgactcaaacactgggtaccacagcctagccaagttgacataccaaattaactgtcacattatcccgtcatgcctgaggggttctctgaccctcagttttctgaggatcaaatttaaattgagggatctatctttgtttattggagccatatagctcaaagtataatcattttctctccacaggaactagacctagggataagggtaattgcttatttcagaggaatgccatctgaataaaaggataattatatagtaagctctctgttcaaaaaatgtaaatattaaagtttgaacatctaaattccatcttggtttcccccactgccgctgcccaatacctgttctctttcagttgcagtatgcaggggaattctaagtttaatattagtctcagcaaaatacaatggtgaagatgactctttctagcataacaatgggtatgtggtattccaaatacttttggaatgcggagtgactattggctatgtgctcttcaaaaaattaataatgaagaactgagcatgtaatttcacttatattacttattttatcctcacagtggcctttcaaaattgggattattactcctgttttacaggtggaaagaatgaggcctagaaaggctcaaatcttgaacacttcatggccagcaagagccagggctggaatcatcaggcaggcctttgggttacaagccttgtgccttttctgttgtcccaaaggccagggtcaatagggagtgagttatctgtgggtcacttatgcagacagaatcactgaatattggaagtttttggggttctcttccactggcctaaaaacctgagttaattgagttttttttaacaggggtaaataattttctgttttagatcagcaaattcattccataggcagggataggggagaaaaatcttactgaatatcccttgtcttgttctcctcctccccaaacttaatgtcctatgacactagctttatcccttaggtaactcttgattatccaaatttcatgagaaactttcctaacattgcacatgctcaaactcaaaaccccaaagtcataagaaaaaagataacataagcaagaataaaaaacaattatttgatcatatatgtcaaaagattaattactagactatataaataaatacataatccagtaaaacaacaatccaataaaaaaggcaaaggatataatagtttatagtagaatatgtgcaaatagtaaaaaataaaaagataatcttactcattaataaatgtaaacagaaacaatggcatataaccacaagtgtggcaaaaagaaaaaagactactttgacaaagttgtcaggaaacaatcactcttactattacaacttggtgtaattgttttgaaaggcagcattacaatatctagtcaaaactgtatgagaatataggtaccctttgactcagctattccactattttaagtatgtaaagacacacacaaataatgtatggaaatatatatacacatatatactatatagtatatatagttcatatgtatgttatatgtttgtgtatatatctatatacttatatacaccctttgactcagcaattctattcctataactcatgtatgtaacatatataatacatatctttatatacacatatgtacacacatatctgtaagtatgggaagatgtatacacatgtacacatatatatacatacatatgtatatatgtattttatgtatggatacatatgtatatatggatagattttacacctacagacacatttagatatgtaacttcagctaaagcaattcactcctatataaattgctacagataacttgtataagtatgcagaaatgtttctttatagcagtgtgtattagcaaacaaagtgcaagaaagagaaaaatgattgacatgcttgtgaggagactttttttgttgttgttgttgttagggctcattcataaaataataaaactgtgcatccataaacaataatgaagcacatctatatgcactgacaatggaagttgtcaaagatctattgctaattaaagaaagcaagtgacagaatagtatgatcccattcatgttttccaaatatgcatgctgggggagagatgtttgcaattatatgtacttatatttctggaaggataattaaatatttgtaatagtggttacctttgggtagtaagaatgagggtgggaaaaatttcagatttttgcttactactttttgctttctggactgtttgaaagtttaccatgagcaagaattattaaataacaaccacaggaatattggggctcaaacctagagattctaattttgtagacctggagctgatcaacaagtctaaatgttaaaacatcctcacgggtgattctgacatggagccaggattgagaaacaattttctgaaatggaaggggttttaaacttgttgtcctcaaatgactactgaggcaaacaccattcttatagacataagacatacttgggagcaaatgtataataaagtggtatgcttccctagaaaggggacgaccttaaatctttctgtttatggtggtatttaaacatattaaaaactactaattttggaatagtcttactgtgataagtctaactatcaaaggcagtccagagattagcaaataatagaggatgatcaaatgtttttcagaaaatattataggtggcactttggcaggagattctgagaatggtgagagggtgcctctgtgccctaggaaaggtgatagagcttagaaactcagaactcagatggaatgaggagccatgccatatacatctttacaacagtcaccctctagaagaaaactctgtgttgacaataatctgctgacttgtctgtgggtttttgaacagaataaactgtttcttcttttatgtttgtgtattattgcttataaatatattctaaaatatataataacaaacaataacagtacttgcagcttaattaaagaaaaaatgcaagtatcttatttatactaagagaagagagaaacccgaagaacaatggattatccttacatatttggtttgggattacattgagagctacctaaataccagacactcattcttggtcctgactcctactctgttatccatagctcagtacctagtatctggc

SEQ ID NO: 1323 - DNA, 240 bp, Homo sapiens
gtcggccccacaagcccctcacggaagggcggctccgtgagatctcactgtactgaccagtcctgccactgccaggacgctgggcctctcagacactcgatgagaccggtccaactccaggtggcaactggagctgggttgctgccgggcccttaacactacatccctacggagagggcggaacaggagagaggaatagcagaagggaaaggcagaggggagggtggcgaggaagaaccc

SEQ ID NO: 1324 - DNA, 189 bp, Homo sapiens
gaggttcaagaccagccaggccaagatggtgaaaccctatctctactaaaaaatacaaaaaattagccgggcgtggtggtgggcgcctgtaatcccagctgctcgggaggctggggcagagaattgcttgaacccgggagacggaggttgcagtgagccgagatcgcgccactgcactccagcctgggc

SEQ ID NO: 1325 - DNA, 416 bp, Homo sapiens
gcagctgggctcccctctctcctggagctccccggggccgactcggatccagcccgtcccgggactggctgcgcggggcagggggccgtctcggagaggccaggtggtggtggtcagcccccgtctgggtctcttcctcccggcctagtgcctcatcctcgctgcgggcaccaagggggcggctctgggctgagaaagctgaggagtcactgtcctcagagtaggagcggggatgcggcgggcagctgatcccagggcctgggagcctcggcccctgctttatgctttgtaagcgaataggggtcacctagggtccggagcgccggcgctctctcgcggggaccaggctaccagggcaggggctaggggtgggcgacaccctctgcggggacagggtgcggaccctcgacgggggc

SEQ ID NO: 1326 - DNA, 165 bp, Homo sapiens
gccaagcgaaggccagtggccgcagcgacgcggcgcggagaggtggtgggtgctctatatggcggcggatctgtcgggcctggctgtccggctctagggctcggccgccgcccgcccccgtggggtcttctgcaaggggctgactcgcaagctgctgtcttcttc

SEQ ID NO: 1327 - DNA, 175 bp, Homo sapiens
gcacaccgtccgcgcacgcctgaggctgggatcccgcgctgcctccccggcgatctgtctgagttttcttcctcctggggtttcttcctgctggtggaccctccgcgaatcccggcctccggagaccgtcctggtaactgccctggccagggctggtctcagccccgactctgac

SEQ ID NO: 1328 - DNA, 123 bp, Homo sapiens
gcgcctgcgccgccgctgtgcgcctcgccgccgctgtgcgcctctccgcccctgtgcgcctctccgccgctgtgcgcctctccgccgctgtccgcctctccgccgctgtccgcctctccgccg

SEQ ID NO: 1329 - DNA, 41 bp, Homo sapiens
gcgccgccgccgaccgcctctccgccgctgtccgcttctcc

SEQ ID NO: 1330 - DNA, 140 bp, Homo sapiens
ggaatcccatccaagtactaaccagtcccgaccctgcttagcttcaacagatcagaggcgagcgggcgcattcagggtggtgtggcctagacgccagcagtggcgcctggctgcctcaagagcccggcccagccaagccc

SEQ ID NO: 1331 - DNA, 108 bp, Homo sapiens
gtcgcccaggctggagtgatgtggcgcgatcttggctcactacaacctccgacccccgggttcaagcgactctccgcctcagacccccgagtagctgggattacaggc

SEQ ID NO: 1332 - DNA, 98 bp, Homo sapiens
gcccccgtgcagctgctgcagggcagaccgcctggcttggccgcagccacagggacatctggccctcgttccgagatgtgggaagtgagggcggactc

SEQ ID NO: 1333 - DNA, 349 bp, Homo sapiens
gcaggtaaagtccatgcgcgccttgcctcccaccggcgccttcccgggcctctggtttttgtccccgccagcggctccgactccatcgcgtcctcttccagtctagtgcttttttccagatctcgatcccaaactccctcctgccagaatctggacccgaatccacccattgctcattttccgctgccactggagagaatctctgaggtccccaggagagcctgcctgcacggaagagatgcctcctcagtatggccgtccccggagaggagcgattaagtgcagacctccatgttgctcttgagcctgagcggcttcagggagccatgtttgttactggcgggcgccg

SEQ ID NO: 1334 - DNA, 89 bp, Homo sapiens
cggtttttgcccccgccgccgtggcttcttacccccgccgccatggcattttgccccacgtcaccgtggctttttgcagctttttgccg

SEQ ID NO: 1335 - DNA, 226 bp, Homo sapiens
gccgccgtgggtttttgccgctgaggctttttttttaaccgccaccgccgcggcttttagtccccgccaccgcggttttttgcctccgctgccgaggctttttgtccccaccgcctttgctttttgtaggttttcgcccccgtcgctgcaggttttttgccccctgccaccacggctttttcccccagccgcggcggatttttgtgttttttttcccccgctcccg

SEQ ID NO: 1336 - DNA, 124 bp, Homo sapiens
ggctgacaggcgggtcggagccgggccagcggcggatctgggagcctgcggatcccagattccgaactggagcgtcagggatctcgcgggccaggccaggcggaggcggagggtggtgggctcc

SEQ ID NO: 1337 - DNA, 217 bp, Homo sapiens
gagcacagggcacaggccgggcgttctccggctattcgagggcaggctgtccccatgacagcctcaggcgcaggagggaggacggcctgattcgagtctgtggaaggaggaagaagctcatttcctgagccagcagggacacagaggtggatgcgggacacagggacacaggggtggatgccataaaaatatatggcatatattttgaaacatggcc

SEQ ID NO: 1338 - DNA, 86 bp, Homo sapiens
ggggccgctgtcatgggcactcggcagtcaccccgtgtggggttgagcggcgggttttcagttctcgcccctgtgcagccgccacc

SEQ ID NO: 1339 - DNA, 285 bp, Homo sapiens
gtttaatatagatttaccagggggcgtgcagcccgcttgccaatcagatcgctgctgagcggtcccgcagccaacccccgaagagcagcctgctggcttccccagcgcccaggagttggggatgtcctacaaacctaccacccctgcccccagcagcacccccggcttcagcacccctgggccaggcactccggtccctacaggaagcgtcccgtcgccgtcgggctcagggccgggagccactgccccttgcagaccgctgtttaaagactttggaccacctac

SEQ ID NO: 1340 - DNA, 155 bp, Homo sapiens
gggcctcggaaaaggcaggtctgaggatgcgcaccgacgcgggacctagtgcaggctggtggagccccctccgcggtcctctgagtacagctgccggtccccacctctgaggcagaacttgaggaaaatggggtcaaatggaaggtactggtatc

SEQ ID NO: 1341 - DNA, 73 bp, Homo sapiens
ggcggctgcggcgcagccccaggcggcgggtgggaagaggactaccagaggggcctgcgggagacccagggtc

SEQ ID NO: 1342 - DNA, 226 bp, Homo sapiens
gagagtgtcttcccatcagtccctgcactgggacctggggaccctggtgtccctggttcgagctcagggtgtgcctcagccgctaagtgcaccccaaggggagctttgggagcacaaagcccatgagggaaggtgagttttgagggaggagtggtgaggcacctgtcacagaaaaagaaaaaaaaaacaacccgcgccacggagaagcagggcctgggtcccccac

SEQ ID NO: 1343 - DNA, 1429 bp, Homo sapiens
ggcttcagcaacaactcatgtatacatacacatttactatatgtaaacaggtcctgtatcatacttaaaacacaagtgtttgatctataaatatttgattcttagtatttaaaatgcttctaatgttttaaaagacaaaactccaccatgatatcacattgaacattaaaattattcccacagcaacacttatttcagagaaacaattaagtcagttatcttagtcaccactaaaggcacctggtgagaaaagcctgaactaaattttaaatattaaaaaattaaagagacatctagtgcagagttcaaacctttatgttgaattgtttaagagtcattactgatttcatgacgctgataagtgttggagttgaaatgatttttaaaaatgcagagaaaatgctaagagaatattatatagttcccctaaagatgcttcttctaacctccaagtattaaataagactgatctaaatgttaagtacatatagagtatatatttgctagtcatctataaattttaagtacaattccagtgatatacctgtatcttttggaagagaagaactaaacctgccatttcttaggctaaatagatgattcataaggtccttccctccccatttattctgactgccaagcttgtgttcagtaagctcttggcatctagtgattaaccagtgacagcagacagtagtgaccaagagagatggagagaacgatggtgtaagacagtatataaggacagtaagccactgtatttgtggaaccactgcatgtcaaaactccttaacactctaacaaggcatttttggtcttttaagattaaggacagtccttacataagggactcagtttcaaactaaagtgcatcaaaaagcaaattatacttcacaaacaactttaaagaggtagccacaaacccagttgttttagattggccttctaaatgaagtcagcacatggatccatgtgtgagtgtcatggacgtcagtgattatgtaactgtaactgaaagaaaaaggcacagctctgcagacacccaagagaagctggcatgtttaatgtggatgtagaagggataatgtccatggcaactgattggaacacaactgtcagcagcctcaacgcaggctaagactgggttaagccccaggagatgcagagaacgattgaggaagctgtgctctaagggcacagtacagaaggtagcttggagtgtgctatgtttccgagagccttttaagttgggtggctgagtaaaggagggtggaggcaggctgttctacttccaatccatggataaatctcattttctcaatgtaatgcagaggctgttcttctatgattggcaaacactatttgttcttatcatggaaacagcatactgctatcaagaaatagggaaaagacagtaaaaaaaaaatac

SEQ ID NO: 1344 - DNA, 121 bp, Homo sapiens
gcagaaccagggccaggtgtcccagtggcattctgaccggcggcggcggctgcacaggagcgagaactgagaagccgccgctcaaccccacacggggtgactgctgagggcccataccaac

SEQ ID NO: 1345 - DNA, 165 bp, Homo sapiens
gtggtgaaaccccgcctctaatgaaaacacaaaaattaactgggcatggtggctggcgcctgtaatcccagctactcgggggtctgaggcggagagtcgcttgaacccggggggcggaggttgtagtgagccaagatcgcgccacatcactccagcctgggcgac

SEQ ID NO: 1346 - DNA, 108 bp, Homo sapiens
gactcctttgccaggggctgggcaggtgtggagaggggcggagctgtgctgccctgggcgagggagcctcccgctctggacggttcgccgcccctgccccaggaaggc

SEQ ID NO: 1347 - DNA, 171 bp, Homo sapiens
gtgcatcacggcctgacaatggattcctgtttcctgtacaatgtggagtctccaatatagcctgtttgaaaactggaaaggagagcaccgacacgatgctggtcttccacgcattcctggaagtttctggggccccacagagctcgcgaaacaaacagtcaacatggtcac

SEQ ID NO: 1348 - DNA, 63 bp, Homo sapiens
ggctcattgctctctggggaattcgctcattccttcggaaacggaattggtctgaattgctcc

SEQ ID NO: 1349 - DNA, 1609 bp, Homo sapiens
gaggtttctcactattattgtacagtttttggtctctccttttagatctattaatgtttgctttatatatttaggttctccaatgttgagggcattatatatttacaattattgtattctcttgttgtacttacccctttattattacataatggccttgtttgtctgtgtttacagttttttttacttgaagtctattttatttgatataaatataactacttctgcattcttttgatttccattgtcataaaatatatttttccatctgatcactttcaatttatgtgtgtatttacaggtgatgggagtctcttgtagaaagaatatagttaggtcttgtttttaatccatttacccattctctgtcttcttactggataatttaatctatgtacattcaaggtaattattgatagataaggacttgtactgccatatactgttttcttcttgtcttttagaatttttgtacctttttgtccctttgttgtcttcctttgtagttaagtgattttctctgtgtgtttttgtttcttgttcttttatttttagtgtatctaataaaaatgtttgccttttggttactatgaggcatgcgaagaatattttatagtttcaataggtaattttgaatggataacaacttaattttgataataagaaatggggaaaagcaatcactctgctctttaactcaatcactcccccacattttgcatttttgatgtcttaatttacatcttttatatcacttatctcttaacaaattattgtagttgttattatttttgttttgtattttaaccttcttactaaaaacatgtaagtggtttacattcaattattactatattagagcatcctgaatttgtctgaatatttatttttacctgcaaatttataccttccaattttttgtattacaaattagtgccctcttctttcagtttgaagactgttctttaacatttctttggtatgatttggtataattttttcccattattttaaattctttgttgaatttctcataaatttccatattgtttctctgtactttgttgaagtgcacagatttttttaaaaaaaaaacagctatttgaatttttttgtctgccacatcattcatttgcatgtctttaggttcagttgctgacaccttgttttctccatttggtgaggcagtttttcctaggctattcttattttttgtagatgtacatctctttctacacattgatgaattaaatatttatttcagtcttctcagtctgggtttgtttttgactgtttctcagtgggcttgtttagaaattctgtgtggatttccattatattccattttagcattaggaggtgcccaaagcaaaggttagacataagtcttgcaatagggcttcaccactgatacaatgtaaatggacgggcccatgggtgatccacagaaaggctgctgtctgttgggggagaacaagtcaggccatcaaatctggacagtctgtgtatcatgtttcccacaacgtggtgcccataaacaacctgtctggtataatgtttcctctggtaggaatggctagccactgctaagtttcatatagtaagtatc

SEQ ID NO: 1350 - DNA, 1176 bp, Homo sapiens
gagattggctgccttgaatcctactaaaatttcaatgtaagttttagagagggaggaaagagtcaaagaaaaaattgcactggaaaaatttaaataagtaaggaagatattattcaagctattgcaatacaggagagaggccagacctagtctgaactcagctcccctgatacaaagggccgtggagtttttgaaagtgagggtaagggggcgatcataggccacctgtctttgctaactgtcttttctcaaaggaaaaataaactttcttttatctttatgatataagataatttttacaacttggagcaagattaggctcttactctctcatggagactgggaaataaggtattatctttctggaggattacatttgaaagggatggctcccagatccttgaaaaaggaaattttctgcttacaagttacacatgccacttctacctgcatttcagtggcctaacaggtcacatatctaaatctgacccttccttcaataggacagaaatgtataatcttctaggagatagggtcactgcagtaggaagaccagataatgggagaatgataatataatctaccacaatgaccacagtgaaaacattagtaatcctcagggttaaaccaagacttcttggacacttaggttgattctaggctattctcaatagtgaaatagtaaaaaataaagagaatagcccatttattttttgcagagaagctagacaattcacagtaacttatggcctagacaattttgtttcttgatcaacacaaccctttatagatgcctgtggtccaaaaatgcggattcctaatcgtcgccaaaatgaagggatcctctgcaaggcaacctgggagggagtttaggattgttctgaggcagtgaaagtcattgagattcacatgtaagagggtagagaaagggaatcaacatgttttgatccctccatgtgctggatataacttggtcttcattatattgcaccatctttggtgtcagagagaactggatttgaatctcaattccatcactcattatgatttgatggtgaatgtgtttttaactcatctgagcctcagtttgctcatctataaaagatgggattgttatgagacttgcataaggtaagtgtttaaaaatctgggaataatccctgtaatttaaaagac

SEQ ID NO: 1351 - DNA, 158 bp, Homo sapiens
gccagggtccccagggcccagcgaaggggctgatgggatggcactttcatccgtgggggacccaggcactgcttctcggtggcgcgtttttttttctctgcctcaggtgcctcaccttcccctcatggaccttttgttcgctttgtggtaccccaagc

SEQ ID NO: 1352 - DNA, 68 bp, Homo sapiens
gggggtggagcgctgcctggcgcgcaggagtggagacctagacgccctgaacaagcagcacagatagc

SEQ ID NO: 1353 - DNA, 209 bp, Homo sapiens
gccgccccaaacaggacccaggatccagccgccgccacagcggcagcaggagcatcgcggccgccgcggggcggtggcaatatttaaaggggacgcagcctatctgtccggagcggagcgcgagtccgctcagccaatgcgcatgcgcgaggcgcgagcagtttctcccatcacagtggttcccacggttgtcttagaaaccagtcccc

SEQ ID NO: 1354 - DNA, 358 bp, Homo sapiens
gctttgttcttaaaggtgagggggcttgtggccaaatcatctagctcttcatccccaggctccttcagcgcgcgtccttctgcctctcttctttggaccagcacttcccccaaacgctcccccgcgttgattcccggtcccctcccacctcatcctgtggctccttgtttcgggaggcagttgtgcttctgtgaccccgcggctcctgttctgggacgtctgctttctccatcactccctggcttcccaggcgggccccatcctcctgagcagagcggagcagcgcgcacagaagcgccactgttctgccttggcagggcctggcccgacagcttgtgcctgcgcagcagacccatcc

SEQ ID NO: 1355 - DNA, 265 bp, Homo sapiens
gggactgactctgcctcccacgggcttcctgaggccggaccgccgcggggacgcctcctctcacgcccaccaggggcgcgcgagcctcaggagacgccagcaggggttgcggagctgcggtgctggaagccagctgtcactccaacccagctggagattcctgtcgggaatgcttgggataggacagctgtgagggagcccctggggcataggaaaaccctcacagttccagaaaaaaacagaaaacgcatgcacagtttttctc

SEQ ID NO: 1356 - DNA, 123 bp, Homo sapiens
gacgtttttgtttttgtttttttcgcttttccccaggtgcctcaccttcccctcatgggctttctgcccgccttgaggtaccactagcgggcccgaagcgcaccctggtttcgagccagggac

SEQ ID NO: 1357 - DNA, 79 bp, Homo sapiens
ggtctccggaggccgggattcgcggagggtccaccagcaggaagaaaccccaggaggaagaaacctcagacagatcgcc

SEQ ID NO: 1358 - DNA, 170 bp, Homo sapiens
gctcagatgtggcagtatttaaaggggacccagcctgactgccaggagcggagcgcgagtcggctcagccaatgcacatgcgcgaggcgggagcggcttctccagtcacagtggttcccacggttgtcttagaaaccagtcaccgaggcttggcgaagaaggagccctcc

SEQ ID NO: 1359 - DNA, 303 bp, Homo sapiens
ggacgcttctgtaactcgcaagctgcttgaggcaaaatcggtttcagagcgggcagagctcaacgctcacgtacgtcaggctttcttgcactactttcaaacttccaagtgtttttcacatttcttgtttcttatgttttcattcatgttcctgtactatgaacatacgaagtcaaatgcgaatgtaactcttacttttattggagactaagaaaagccaagtgatttttctcaaaatgcagcaaccggctgttacgtggcacagggcccggctaatcaaatcctattcaaccatcagtgacc

SEQ ID NO: 1360 - DNA, 323 bp, Homo sapiens
ggctgctttgtttacctaagcaagcctgggcaatggtggtcgcccctcccccagcctcgctgccgccttgcagttagatctcagactgctgtgctagcaatcagcgagactccgtggtcgtatgaccctccgagtcaggtgcgggatataatctggtggtgcaccgttttttaagcccgttggacaagcgcagtattcgggtgggagtggcctgattttccaggtgccgtccatcacccctttctttgactaggaaagggaactccctgaccccttgcgcttcccgagtgaggcaatgcctcgccctgcttcggctcgtgcac

SEQ ID NO: 1361 - DNA, 109 bp, Homo sapiens
gctgaagcgggcctcgtcgctctgcaggaagtccctgatggactggatgagctgaagtttcctctcccagaagttctcggggactaggtaggcccgtggggcaggcggc

SEQ ID NO: 1362 - DNA, 268 bp, Homo sapiens
gcctgtaatcccagtgagaggtgacagtgtgctggcagtcctcacagccctctctcgctctgggcgcctcttctgcctgggctcccactttggcggcacttgaggagcacttcagcccactgctgcactgtgggagtccctttctgggctggccaaggccggagcccgctccctcagcttgcagggaggtgtggagggagaggcgcgggtgggaactggggctgcgcgccacaggccagctggagttccgggtgggcgtggtcttggc

SEQ ID NO: 1363 - DNA, 300 bp, Homo sapiens
ggacctcagggattgctttctcgtctatcatgtgacctggcatgatagcagtctgcaccctatgtgcttcatgcctttgatggttttgagagctgaatgtaagcggctgccttaaaaaacccagagttaataattctccaaggcagaagccaggatttgcaccctggggaggcctgacttcagattggatgattccacagagcgtgccgggaagcctgtgtgacatctggtccctggcagggtttccgggagatgtaggcgactgctgcttcctcctttcccatcctggagaaatgttac

SEQ ID NO: 1364 - DNA, 408 bp, Homo sapiens
ggcgctgcagaagcacatatgccaaggacctagcgctggagacgtgcacacgcctgggaacaggtgctggggcggcacccaagcacgggagccagcgttggggaagcggcacaccccagggagctagcgctggcaaagcacacccaccaagagtgagcgctagaaagccgcacacactatgggagctccgccctggagaagcgtcacgtgtgtgcctgggaaccagtgctggagaaagtatgtggaagctggcgatggagaaggcgcgcgcatgtgtgcacaacctcgctctggaggagtcacggccaggtgcgcgcacgacaaccttcaccggagaagtcacacgcatgcgtgcgctggagaacctgaatttgtaatttcaaatttccctataaagaaatatccacg

SEQ ID NO: 1365 - DNA, 643 bp, Homo sapiens
ggccaaatccagccaacagatgtgttgtgtttggccacagcaatgtttttaaaaaatttgaatcggtcaccagcatcttaaaattgagatttcacatacaattctggaccttgcagcttctctttaaaaactcagctgttgacactgggtgcacatccccacataatcctaagagccagctggagctccacagcagctgctcgcctaagacagggcacacagctcaccagggcactgtgatccccacgctgcccgcctcagccttgtgagtgtcctgagtctcctgcgggaggcagccttgtgactcctgatttaaagtctgagggtgggtcagaccaatgctggtaaaagtttaacaacagacactctcttgaaaaaaaaaaaaaaaaagtaaagatctgattgtagcatttgccaatttctattgtataaatactgccaccgtagcctatttcaagctcccaacattaggtcactgaaactggagctagggaagagatgcacgcaattggctctcacaggctggtgagagccagcctcagcacactgctcggtcacatagacctgagggcaaatgcagaccccctaaggaagtttcttacctccacatgccaatgtcctcctgtattaacaaggagaaatc

SEQ ID NO: 1366 - DNA, 107 bp, Homo sapiens
gagcggcggcggcaggcggccagcccgggtctacctcgctccgtgcagggccgggagagggatccgccatattggagctggggccgaaggtgccttggagccgcggc

SEQ ID NO: 1367 - DNA, 128 bp, Homo sapiens
gtcaggggccttgctctgtcgtcgttgggacacaggcaggggctgggcagaggctgggcagaggcctctcagtaacagttccctggaccgtgagccctgcctgccgagggaggatggcctggcagaac

SEQ ID NO: 1368 - DNA, 297 bp, Homo sapiens
gaagccacagcaagagctggacaaacagcaggacgaacggtaaactccagccttgcctgtagcttttggctctaacctttagaatacattatgagcaccggccgggcgcggtcgctcacgcctgtaatcccagcactttgggaggccgagacgggcggatcacgaggtcaggagatcgagaccatcttggctaacacggtgaaaccccgtctctactaaaaatacaaaaaattagccgggtgcggtggcgggctcctgtagtcccagctgctcgagaggctgaggcaggagaatggc

SEQ ID NO: 1369 - DNA, 404 bp, Homo sapiens
gtatcgcctaaggacacgaaatcgggatgtggtgcaaatatgtgtcctgctgcgttggttgtcggcacgctgcctgtaaccaagacgtggaatcgacctaagtgcccatcagcagatgactagagaaggacaaaggagtggggttcgcagaagaaacacatcagggaaaggaaaggagagccggtcatctgggacgtcatgcatggacccaaaagtcatggtgcccagtgaaatcagccaggcccatccgacccgtattgcgtgatctccttgggatgtgggatggaaagcggtgaggatcgcgaaagtagagaggagaaaggtggttggccgggcctggggccggggtaggggcagggaaaagatgccaatgcgagatgtgggtcaaagggcagaaagtttcc

SEQ ID NO: 1370 - DNA, 176 bp, Homo sapiens
gcaccggggctgcaggtggagctgtctgccagtcccgcgacttgcgcccgcactcctcagcccttgggtggtcgatgggagtgggcgccttggagcagggggtggcgctcgtcagggaggcttgggccgcacaggagcccacggaggggcgggggggaggaggctcagacatggcc

SEQ ID NO: 1371 - DNA, 110 bp, Homo sapiens
gcggcgggaggatcgcttgagcccgggagttcgagaccagcctgggcaacatagtgagaaacccgtctctaccaaaaagaaaaaaaaaaaaaaaggaaaaaaattagtgc

SEQ ID NO: 1372 - DNA, 253 bp, Homo sapiens
gaggaaagctccagctgggcccagatttggggcttctgtcctgaaaggcgctggctcctggtgtgaatgggaggcccagggctggtcttgtttaccaccttctgtaagtcctcagtctgcccccgcacttggcaggtccagcccaaggttctcgccccggcgccctcatcaattatagatcccggaggagcagggcttgttatgcaagacttgttcctgtgaaagcctcttcctctgagccaattctgtcctc

SEQ ID NO: 1373 - DNA, 415 bp, Homo sapiens
ggggctgtttcatgttgaggggggttgtaagtttcggggttgggggatcgggggctgggcatgatttgggggagctgatgcgggtgagggatggggtgcgtgttttgggaggtgctgtgttgcatcctgtaaagggctgggggacttctgggtttctaggggctgagtttggggagttgcaggtggcataagcctcaccccagagcttgttctgtgtcgcatgctgggttgtggggcacaggttgtgggtgtgttagagttgggaggtggatgagctgtctggggtgagccgtgagttgtgtccgaggagttgggtgtggtgagctgtgtcctagcacacgctgtggggtgtaggttgtccagggttgaactaggtctttgctctcaacatgaggggtgtgggatgtgcacagcc

SEQ ID NO: 1374 - DNA, 31 bp, Homo sapiens
gagaggacggctgaccgggcggcgcggctgc

SEQ ID NO: 1375 - DNA, 337 bp, Homo sapiens
ggctgacacatctttgatatggaatcatatccaggaagcagcttgaccccgaaggcccctcttagcgtgggattgacaccgagcattgactttgcttcaggcttatccacaaatctcagccaattttattaaagagctgcgtgtggtgtggaacatgccagagagacaactttatttatagatcttgatcggcagagaggagcccacgcttgattctgttggcgccccggcctgcctcgctccacctcaggggggagggggtgattggcaggtgcggctcctcaccagcctccctcccagcccagctgctcgcagagacgcagacacatgtgtggac

SEQ ID NO: 1376 - DNA, 92 bp, Homo sapiens
gcccaggggtccagccgcctatatcttactacgcgtggccaccctttcctgcggatgccccctgcccgccgcccactttcccacctttgccc

SEQ ID NO: 1377 - DNA, 746 bp, Homo sapiens
gagatcacgccactgcactccagcctgggtgacagagcgagactccgtctcaaaaaaaaaaaaaaaaaaaaaaaagacaggggaattacaaaggagaaagagtaattcacacagagccggctgtgcgggagaccggagttttattattacttaaatcggttctccccagtcatgtggggatcagagttcttaaatataatttggcaggtaggggcttggaaagtggaaaatgctgattggtcagattggagatggaatcataggaggtggaagttaggtattcttaatgtcttctgttcctgggtgcgatggtagaactggttgggccagattactggtctggctggtgtcagctgatccatcgggtgcagggtctgcagaatatctcaagcactgactttaggttttacaatagtgatgttaccccaggagcaatttggggaggacccaaaggctgcatgacccctaaattgtaatttctaatcttatagctactttgccagtcctgcaaaggcagactggaccccaggcaagaagaagggtctttttgggaaagggctgttataaattttgtttcagagtcaaaccatgaactgaattccttcccaaagttagttcagcctacgcccaggagtgaacaaggacagcttaagggttagaagcaagacagaatcagttaggtctgatttgttccgctgtcataatttcctgagttacaaatttgcaaaggcggtttcacaggggcc

SEQ ID NO: 1378 - DNA, 277 bp, Homo sapiens
gggtcagggtcctcagagcaaggtggtggtggggaggtgggtaggggaggactgagtgaaaaccctgggacctgagtcccacctccaatctggactcccccccttctgacagccatatccaccttctggacctcctgaaggtcgagggtgcagtaccggctctgcctcctgggggagctgccccatggcccagggcgctcatggaccctagtcccctctgccctgctgacaggccctgcttactctccccgcagccaaacccaggatccatatgaac

SEQ ID NO: 1379 - DNA, 590 bp, Homo sapiens
gttgattttatagctcggttacgggagtctcttaaaaagatgactgcagattcggctgctcaggatatagtgttgcagttattagctttcgacaatgctaatcccgactgccaggctgctctgcgacctatcagagggaaagcgcatttagttgattatcaaggcctgtaatggtatcggaagtaatctgcataaagctactctgctagcacaggcaatggcaagactgagagtggataaaggaaatactccatttcctgcagcttgttttaactgtgggaagcatggccatactaaaaaagaatgtagaaaaaataagcgagtcaggctgccagataggggaaaaaagaaaactgctgagcctgaaatatgtccaaaatgtaaaaaaggaaaacattgggctaatcagtgtcactctaagtttgatatagaagggaacccgatttcgggaaacgccatgaggggcccgtcccgggccccgttctaaaccggggcatttccagctcaggccattccatcacctccgtacaatgtctgtcagtagatttatgctgcacaaaagctgtgagccttctgcctggggaacctcc

SEQ ID NO: 1380 - DNA, 338 bp, Homo sapiens
gtgcactactacccccagacgcagctggagctctgcaagagcgctgtggacgccggcttcctgcagaagtacttccacctcatcaacaggtgagggctccctgcacaagctccctgcccccagggaaccccgacacagaacctcgggcctgttaggcggctgggcagattggaggagtccaggctaagttctaggagcagagacctgtggcggcatcactcacccctcccctcactcgtttcctgctgagtctggatttggcttcagagcctcctcaacccagcctgcagcagccattacccacccgccaaggtgacaggagaggtgaggccgttgcc

SEQ ID NO: 1381 - DNA, 148 bp, Homo sapiens
gggcttttaacatggataacgggatgattgaacttcccatcctcccctgagggcctgccacatcactgggagggtgcagggaaggaaacccgagtcctcaggagggaaggccaacgtcagctggagcccgagggcctgccacatcacc

SEQ ID NO: 1382 - DNA, 283 bp, Homo sapiens
gtctagagtttgcctcgaggcctccgggtagaaggtgtgcatgtctccaccagtgtcatgtggcacctgcagatggcttctcgctggcacctgtcatgctctgcagacgtgcctggaaaagaagcttatgttgccttaaggtcatctttctcctttgagggagagtacagaagtcgtggcgacacccacagccaagccaggatcgttatctacgcgtgagcatgcagagcgggcgtgagatattcccgctgaatcaagctaaaaataacgcatccaagctgcc

SEQ ID NO: 1383 - DNA, 140 bp, Homo sapiens
gggatcgccgtaggataggaagagggcgtgagggagcactaccgccaccgccaccgccaccgccaccgccaccatctaccgcctgagcctgcaaaagcccaggaggctgaatcacagccacgcctaccgcatggcgtgtc

SEQ ID NO: 1384 - DNA, 267 bp, Homo sapiens
ggtcccaggtcccgcctcccttctggttccttccggggtgacctgcacactggggtcccggctcccttcccgtgcctttcgggggtggccggcacgtcccagtgctttgctcgctgtctcagcagaattcttttcagtttgtttattttttcccacttgttttcaaaaaggagttctggcctgggttttcaggcctgtttgctatggaagagcaggttcctggagcaccgccaaggcccgctgcctggatggaggcagcttccacgc

SEQ ID NO: 1385 - DNA, 373 bp, Homo sapiens
gcttggaggaccctcctgggtgcttggggtggggtctgatgcctctatctgccattagaagccatcccatatctcctcatcttcctcctcatccccagtgcctgtgccttccccttcctggagtggagaccaggggtcgtctgcctggcctggtgggacccccttcctgtgtactgcagtgactcacaggagccgtgtgaggtgggaggacgtgcttatctgaatgcaggagggagtgcaggcggggtctggaggccatagggggcccaggtctgaaagggctgagcccagcaagacctgcctgccggctctgggtgagaaagcccttaggtagaggggaggggacactgggatggggtcctgggctgtggac

SEQ ID NO: 1386 - DNA, 109 bp, Homo sapiens
gggctgctgaactgccgccacctcaactggctgccccacaggccctgagctctcgggaacttctccttccgtcgcgggagatgaagtgctttttcctcttgacgttaac

SEQ ID NO: 1387 - DNA, 178 bp, Homo sapiens
gtgtggtttgagatgatgcgtgtctacagctggaaccacatcatcctgctggtcagcgacgaccacgagggccgggcggctcagaaacgcctggagacgctgctggaggagcgtgagtccaaggtgagggtcggcgccgcgggtgggcgcctggcggagccgaggtgcaggacgggcc

SEQ ID NO: 1388 - DNA, 325 bp, Homo sapiens
gcagccctgacgggggtgatggagagacctcgtgggtcccaccaggctcggggtcccagcatcctgaccatctggaaaccctgtcttcccccgacagcggctcgggctgggaccccgccttggtgttcccagcgcttgctggcacaaaggggcccacgaggggtttgtggggcgagcatgaaacatgtgagccagtccacggccatgggcccagcagtcgggcactttccatgtttattgtctggctgtcctcagaagggactgctggccgggctgggggctgggctcggctcgcaggggctgggggcgctctccagcatgtctc

SEQ ID NO: 1389 - DNA, 172 bp, Homo sapiens
ggccaggacggctccaccatctgtccccaggacggctccccagctgacacccccgcgccggccgacgggaggacggatggttgcagggacgcaggatgggcagaacacagggacgccacttcctccaaacgacacccggctaatggggctgccttcaccttgagacacagac

SEQ ID NO: 1390 - DNA, 152 bp, Homo sapiens
gatccgcccgcctcggcctcccaaagtgctgggattacaggcgtgagccaccgcgcccggccttagctggtttttcaaaagtcatggcgtgtaattgtccgaacagtgaacttcggagatccaccggaggggcgaggccacagctcgaccgc

SEQ ID NO: 1391 - DNA, 102 bp, Homo sapiens
gcactctcccctgaactctacacaacatattttgtcaccaagaccctacttctaacctccctgttcttatgaattcgaacagcatacccccgattccgctac

SEQ ID NO: 1392 - DNA, 224 bp, Homo sapiens
gctatagctagggggctgcctccctaagccccacttctctgagtctcctgcaaggtttgtgtgagtgcctgggggccgaggccctggcgaggaggatgggggctcgggggcctctgtgacctgggggaggggctgtcgcgtccccctgtggtcgcgtccccctgtggtcgcgtccccctgtggtcgcacctgtgggctgtcggccgtaggtaccgctcaggccc

SEQ ID NO: 1393 - DNA, 347 bp, Homo sapiens
gtggaaatcactgccaaactatgatgtccaattaaaattcaggttattttgtgggaggcaaacgcaccccccagcctctctctttttaaaccgtcatcttacaaatcctctgatagaaagttcgggctgttttgagggagagcttgtcatcaagagccatctggcttcctcagtcatgacagattaaaataggatacagtatgaaagctttgccacccctccaggggcgaaagaagtcactgggggaaagaggtaattaaaagatccccttgcagagacgggctctgagagggaccctggcactcaccaacggcaaaaaactcattttccagaagagagcaggcccc

SEQ ID NO: 1394 - DNA, 377 bp, Homo sapiens
gggtaaggctgtgaaatgtttcagagactgagtctttccctccccggctgcctagcagataagacttaaagttcacccagagctctgggtgaacaaaactctctgttaatctcccgtgaagaatctaggtgattttcagtccggatgccgtggctcacgcctgtcatcccagcactttgggaggctgaggcaggtggatcacatgaggtcaggagtttgaaaccggcctgaccaatatggtgaatcaccatctctactaaaaatacaaaaattagctaggcatggtggcaggtgcctgtaatcccagctactcgggaggctgaggcaggggaatggcttgaacccgggaggcagaggttgcagtgagccgagattgc

SEQ ID NO: 1395 - DNA, 750 bp, Homo sapiens
gttcaagatggcggctccatcttcccgggaggaactaacgactagacacgttcaagatggcggctccatcttccgggcaggaactagggactagacacgttcaagatggcggctccatcttcccggcaggaactagggactagacacgttcaagatggcggttccatcttcccggcaggaactagggactagacacattcaaaacggcggctccatcttcccagcaggaactagagactagacacgttcaagacagtggctccatcttccctcctctttgtcagccacatgtaaagtaagaaaaacaggaccgagagccccgaccaactacaaagcccatttgcataaccgattagggtgggcaaccagcctttcctgtgggctatgtaaatgtcatgcttgatggaaccaatctctcggagagccccgaccaactacaaagcccatttgcataaacgattagggtgggcaaccagcctttcctgtgggctatgtaaatgccatgcttgatggaaccaatctctgagctctatgtaaatgagacaccgcctcctcaaactggactataaaatccatcacatttggtgccagctggtcctttccgctcggagacccctttctctatagagaaaaccatttctctttctcttctcctgattaaacttccactcctaaactcctcgtgtgtgtctttgtcctaaattttcctgatgcccaatgacgaaccccagggtatataccccagacaac

SEQ ID NO: 1396 - DNA, 367 bp, Homo sapiens
gtggtgtctgtccaggtgaaacctgaccaaggatagacacagctggtgtgggagcggggagggcagagaggaggggtgggcaaggtccgcagggctgcgaaaccccagggtgtgagtgggagagaagcgattggttgagggatttcccctcaacgccttttcggggatgctgggaggggtgtttgctcctagcaggattcaggcacaaaaccagtcttctgagaaagacaatgagctttgtgaaaggaaaataaatctcaaggcccgcaagtcaataagctaaagggaaaagtcaagcggggaactgcttagggcctctgcctcccattctagtcaaagtcccccctttgctcactgagatagatgc

SEQ ID NO: 1397 - DNA, 277 bp, Homo sapiens
ggactgagagtgcgccggtgctgccggccagcacctgggtacccggccagcacctgggtacccacccagctcgcttacttagcagcaccccttccggggtcgagagtcctgggcctgagcctgcagcctcggccatctggtccctcacttgatctcccactgctagttataaacaaatcttgtgcaaacctcccgggctcatccgcagtcccgcggagcggctagacgttgatgaaggatccctggtcgcctttggccgtctcgggctccaggcagc

SEQ ID NO: 1398 - DNA, 424 bp, Homo sapiens
gagcgctggcgtgtgcactccagggctttatgttttccccgtgttgccttcttaggctctgctgcctaggctgtgacaaaggcatccctgaagagagttgttcaaaaaagaaagatagcccttgtgacgggtgagatcatccatatgttacccaataaaaagtcaaaggcttgaggggccctttgagttcactccagagaaaggtgcagcagcctcggctcagtgccccctaggcctccctgacgttgcacggcggcagcattagattatctcactgaacaaggcccgtccctttgaaatagcagtaggatgggaatgtccattaaagtaaacagctgtgcgttctgagaagcggggacactttgttctaatggccagcagttccttttcctgtttcttggttgcctatcagttctttcagatc

SEQ ID NO: 1399 - DNA, 496 bp, Homo sapiens
ggtcccccctgggctggagggcggggggctcggggcagggggggctcggctgggtgcgggctcagaccagcgtctcgggcagggcatcggggttgtcggtcgacaggagctcccagatctgccagcgctctctctgccagtcgagccagccagcgtcccccaggcgcggactgtcctgctcgcccgctggcagggagttggcgctgctcagttttttctgcgtgacctgctgctctcgctcggctgcttggcctccctggtccgtgggtgtctccacgccttccgggggcccctggatccaggctgccgctgccgcgggcttccctgggcccgggtatggaggcgggggccgcttgtcatccctcccactcccatggggtctttggcactgaggtgtggcccggctctgcagcccggccacatccagctcactctcgctgaggtcgtgggcgccgctcagggtcaagtactgctccgacctggccgtgggccgctc

SEQ ID NO: 1400 - DNA, 174 bp, Homo sapiens
gactttcaatgttccacactccccggccaggccagagcctcctcagcttctttttgtctctcccccctcccctcccccaacagctgcgtccatttccttaaggaagggtttttttttctctctccctccctcacaccgtagcggcgcgcgagcgggccgggcgggtggccggcc

SEQ ID NO: 1401 - DNA, 120 bp, Homo sapiens
gaggtttcagcatccggagatgaatggggggaggggacgcaatgtcacatttttcgggtgctctagtcctgttatatgcgggcacatgctctacgccagtctctgtccaccctcttgccc

SEQ ID NO: 1402 - DNA, 152 bp, Homo sapiens
gggcgcccctcccccagcctcgctgccgccttgcagtttgatctcagactgctgtgctagcaatcagcgagactccgtgggcgtaggaccctccgagccaggtgtgggatatagtctcgtggtgggccgttttttaaggccgtcggaaaagc

SEQ ID NO: 1403 - DNA, 118 bp, Homo sapiens
gagattatatcccacacctggctcggagggtcctactcccacggagtctcgctgattgctagcacagcagtctgagatcaaactgcaaggcggcagcgaggctgggggaggggcgccc

SEQ ID NO: 1404 - DNA, 369 bp, Homo sapiens
gagaattgaagtgtgcaaaagaacactgggtatttctaagtagaggcaacacacacacacgtaagacaccgatttccactcctggctgcaaaatggaatcgcctgggaagcatgacacttctaaggcctcgggtgcttatgtcattggtctggggtccgatctgggcacccagagttttaaaagctccccaggtgattctaatatgtagcctgcgttgggacccacggccgtaagagaccttccaggaatgagaaagcaaaagttggataacttgggagaaggggggcttggtagggtctgggttacaggctgtttcttgggttatctgatgtttaagatgcctgaagaatcaaagagtctaaatgccc

SEQ ID NO: 1405 - DNA, 103 bp, Homo sapiens
gataggcgcaccggttctcacgcggcgcgcgcttgtagcgtgtgcatgcaatgtgcacaacagtcctcacacagcgcgtacgggcgtgcacgcgtccttacac

SEQ ID NO: 1406 - DNA, 318 bp, Homo sapiens
ggtctccagtgtcacgtcgcacaggaagccctcggcgcgcagggcctggtagccggtgagcagcgcgccgccatgagctttgcagtaagacaggaagtaactcattctacccagggctggaagcagcctggtgggaccagaggcctgctgggcagggccggaggcatcccggggcacaacactcccgggacccccgcgtaagccacagagcccctagcaggggcccatttctgcctgctcagtttaaagcccagggctccttcatccagacctgcagatcgcccagtgcccctctcagagcaaatccagtctggaaac

SEQ ID NO: 1407 - DNA, 632 bp, Homo sapiens
gttccttcaaaaacaggcaatttgttagtatcattaacaaaagtcagactgaacatttcaactgaaatgtcaaaatagctcagaaattttcttttcttttttaaaaaattaacctgacatgtaattaggccttcagcctgagacattagaatttttatctcaacttacataatatttcttcttaaagggaaagcaatttgtaaactttttcttcaaggtctttctcacctctttattatgacagtgtgattgtcctgctaagggagataattaactgcaacttcattagcatctacaaagacaagcttcctcattacaagtgaagaagaaaagggcataacttaattaacacagcatcaattcatagccaaattagaagcacagattttgtaggtagttttacatcagattcggattcatctacatttctttcttgtttgtgtatgtgtctgtttgtgtggatttttgttttgttgctttacattttagaattcttaaggagcatcttggggaacaggaagtttccatctcattaattgtggactctgtggaagaaggtgacttgggaaattactcctgttatgttgaaaatggaaatggacgtcgacacgccagcgttctccttcataaac

SEQ ID NO: 1408 - DNA, 1581 bp, Homo sapiens
gcaaaaaaggccatttaatgtttgatggtatttttaactcttaaaaactctgttattattatattaacaaacaagaaattataaatagcaagcaggaattttcaagcttttttcttttacaggtacatgctttgacttcatatttgtatatgtagtcttcagaatcacagtgacctatttgtgaaaaacgaatgttcttcctaaatcaaaccatcttgcttataatgttttacacatgaagatggagtgtatatcacagttgctgaggaaagagtagagctaaacattcattcaatttcgtcatgaactttcagaatttatgtgaattctttgaagcctgtgtcttaactcatttgaaattattcatctttcaaataagtattcactctttcccatgctttgtattaccaatgtgttgcagaagacagaaacggagaaagttgggaactatgttataagtcttttgtcaaatgataacatattcaggaatatattattggactgaagcatatttcctgcttgattctgaacaacttctttgtctgtttattgcccctccttaccaggataatccaggctgccaaattggattttggcatgtggcttggatttaccaatgttttgttgccaaccctagatctaaatatgcaactctaataggttctttgctgcatgcacacagcaagtcaatacaccaagacaacggttgcagcagagaaagaggtttaatcacagaatcactgaatgagaagatgggaggaaacctcaaatccatctccctgaggagtttggggctagggtgtttaagggttttgtaatgagctaaagtgtggtgatcattgattggttgaagagtgcagggtgaagtcatgggtcagggagatgaagaaactgtattctcatgctgatccggttcctctgcggggctcttcaaactggttgctagaattctaggcctaataaacatcttaagcaatctttaaacaaaagccttatgattctaatgtcagagattctatctataggaaaaatggggatgcagatcaattcttcaagccttatgaccccaatgtcagaaatcctatctatagggataatggggatgtaaatggtcagcatctagtgctgcaggacttttagcaacaaggaagtggaccaaactgcagcctgattaatgtttaattaaaactatatttctgtccagaacccagcatgcaattcttgtcaacccagtgggaacagtttcaaatacattttgcagctaaacacattgatgattttttctgtgtgaaaaagataagtctctacaaaagggtacaaagtcctttagggtagcaattaatgaactcctcaaagtctatgttagaaatcctgatttatggacactcataatttatggaaatgtcaacctactttccaaaagataacatgagataaatgcaaattaaactcaaattcaaaattcaatgacaacctatttggaaaattcttgtgtaataaacaggtgttttgttttgttttgctcgtttcttctgtcttttgtttgaatgtataactttaatagctgaaccagtttaaacc

SEQ ID NO: 1409 - DNA, 959 bp, Homo sapiens
gtttattggaagagggggtataatcttaggaagcatggcaaaagaaaagaaggaaaatcaatatactgggtgtaaatgaaagggttactactgtggacaactggggctcaatgtcactggccaccttctgagatattgggtaaaatatgcctcagaaatatcctgctgattgctgaggatgctcagatatgtatccactcatttccatccctaatcagtttagggtcactattagggacggggtggaagttaacacttgacacttctgtcctaccctactggcaaaccaagcatgctcccatggccagagagcgccctctggcaaataaccgtatgggtatgggacttatttacaggaaatttctagggtagagcaagaggataagagaactacaattttatattgcttatgttgctctctggttgttttttatgtgtgagttttatctcaccaacaacaatgaaaactctttgagtgtaggggctacagcttatatttgtgttgattcctcccataaattctggtgagctccttacaactgcaagattaaatccattaagcccttcatgattggggggccctgccttcctctccagacttttctttaccatccactttctcatcccaggcatcccagccattcctcaagtgccttctctctgcatagaataccccttcctcccgtgtccaatgggtcaacactgataatctgtcaggatcagctaagtagctcttctttcttaaagtattccaagttttccccaagtaatcatgccctcttttgcaaaccactacctggttcttacttctactgtacaatttatcatactgtactgaagtcctgcctatcagaacatgagctcattaagaaagtaatgtgtctttatccaaagcacccagttcagtgcctgctatggactcaatgctcaataaatacttttggaatgaattaatgaac

SEQ ID NO: 1410 - DNA, 480 bp, Homo sapiens
gggaatgttccagcttccacaatttcctctctatcagtgactcaaagtgtctacgttgtttctgccgatgacatacaagcacagagaaagcttgctcccacagccaacctggcaacctctcttgggctcaggccaagaaagtcctgtccttgttcccttccctgtccagtgttctgctgtaagtccacttcctagctaagagggccaagcacatttagaagcctccgtgccagggaaagcccaatgccattgccaactgcactacatcgccgttcttctgaaggaaattactattgatcccacagctctcctccccatgctgtttgccggggacagccaaggattcccgtgccagctgggctcccacacggctcgactgttcctgcaccagatggccagaccaacaccctctggctgccgcacgctccctgggagacgaggctctgacgtctatcagcctggctttttgtgcacagggac

SEQ ID NO: 1411 - DNA, 559 bp, Homo sapiens
ggactggctccaactgggaccctccggctttctgaaggtacagaaacttgcgagcacagacacactccctgggggcaccagtttccaagaagccctctggaatgtttagctcagaaaccggacagcatgcacaagtcctcctaggtcaggggtcaaatgtgccctctgttttgcaggcccttcgtgcactgcttctaactagctggtgaccttgggcaacgactcagtgcctgagggactctttttcttacaccttacagaagtttatccagctctacaagctaggcggctgggatacaacattaaaaggaatggtcaaaccttcccactccttcctgcagtttagagactttcctccttccaccctgcggagagcggctcctgggaggcccaagctgctccacctaccctccttccttcatctgcttactttctgttgctggctgtgattcctgcataacatttagcatcacctaacataataaacacttgcttggtttttttgtttgttttttgagacggagttttgctcttgtcgctcaggctgcagtgcaatggc

SEQ ID NO: 1412 - DNA, 767 bp, Homo sapiens
gaatggttggcttggtggtggggtgaccccagctcacggaggcctggctccaaagggctgatgtgaactttttcttgtatctgattttttagtgaagcactctgaaaagtaccaagtgtgcagaggggagaaaacacaaaacacatcaagctgcgtccttggccctaatcaggggagcaggaaggccctccagactccaggccctccagactccaggcccgctgtggggaaggtcaggaccacagaggattaggcccagtcttgggtttattgctgtacttgaacaaagtgccgggggctgcctaaactggagcaagagagaggtaattaagagggcctgcagaaggaagtaaaggctggtgtggctgctgcccagggtaggtggaggaagtgttttccataagaataacaagccggtgcaaatgttatgcagaaagactatttcaccaaaacaaaaccaaaaagttcacattctgcctctcaagctgagctgataaacaacatgcaaactttggttggaaccttgaaccagtgggaggtgtcaacccagtttacaaagggtaatggggaaccgtttctgggtacttctctgtttctaccattgtgattctacctgcattagctgctccctttgggggcccttctgacctcccaacctgagcccagcgggagatcactcagaatgcaccgcattcatcaatgccatttctggtaaattggacctcaggttttggagtgtcctaggaggcaggcagcctacactgcgc

SEQ ID NO: 1413 - DNA, 169 bp, Homo sapiens
gccctcgggaagctggcggggatcgactgcctggcggcgccgagcgagtcccgggttccaagctgcgtcgccagccagagagaaatgtgcctgctgaacagtcagtgccataatgcaatggacgccgaacacaactttgctgcgtgtgctttctatttggctggggagc

SEQ ID NO: 1414 - DNA, 693 bp, Homo sapiens
gctttgctaggggaaaagaaacctgttctgttggctataaggtgtcaccaaggcaagacttgcatgtgcctcttaccttgtgtgaaattagtagtttgactccctttaatggggtgttgtgatatttaatgtttgccagaagagccccagagaaaagggtagagtaaatcccaatgatgattctgtagaacaatcctgcttttcttattcatgctcaggaaggggtctgggacaaatgactgaattcaacacaagttcatgttccaacgagcagggccgcatgtacgcacgcagtaaatatctttaacactttataggagagcaaaaggaggcaattctcttagcagactgccctgtaatgctggtctgattcattcctgactgatgtggcccacatgtgttccctgcgacagcagaaacaagtggcctttgtgccctgtcagcgttttccgtcctggcgtaaattagttacactccagccatttcattaagaaattatgtctctgatgtgacgtgtcaggtttccagaggtggacagaaaagcctgcctgtggctgggggcggccttttcccctgaatacaatgactgctcctgtgccacttgatcattagggagagagggggagggacaaacagccgtactagacacgccactaccacagcggagtaggacaagaatgtaacagaattatc

SEQ ID NO: 1415 - DNA, 158 bp, Homo sapiens
gggttcaagggattctcctgcctcagcctccctggtagctgggactacaggcgcgtgccatcacgcccggctaattttttgtatttttagtagagacggggtttcaccgtgttagccaggatggcctcgatctcctgacctcgtgatccgcccgtgtc

SEQ ID NO: 1416 - DNA, 231 bp, Homo sapiens
ggtctgtgtgggcaacaggtcccaacgccctagttaaagcaccagggccctggtgtcacaaagggcgctgcgtatgacgtcactatggtcgccgcctccgccaccgctgccgtagttgctacggttaccgctatggttaccgctaccgttgcagtcaccgttgccgctaccgctgacgtcaccgctaccgttacagctaccgttgcttttgccgttgccgctggctgtacc

SEQ ID NO: 1417 - DNA, 553 bp, Homo sapiens
gcatttcagattctccctatcagattctaccccaaccacgtgttctttcaagtcaaatctttgtcttcgggttctctggcagcacttcttagactaaagccagaccacagagcgtattgctggtgtggttttgctttagccagaactgctgcttcaactctgagtggagctggaatccatatagaagctgatctgtgagaaaaacccacaaagtccaatgggaaaacccattaactaaccttaatgatctcataggtcatccatcctttcacggctccgacagctcctttctcgccccacccccttttccccttatctcttccctctagacattctatggaagcacagacaactttaggagaaaatgccaactttatcaagctctccagtgaacacttgagcacgtgccttagtctgtacccctaagggacagtctcagagactgtaatactaagagagagccagatggggtatatgaggaggagggttttggattttgaaggagtgcaaacctaaattgcttgtactagaatttcagtggaggaaattccac

SEQ ID NO: 1418 - DNA, 331 bp, Homo sapiens
gggtcccggcccacctagcaggctcgggctgagtggaagctctaggtcccggggcttccggcccttctgcggctgggagatctcagggctggaagccgcatggccgcccgcctgccctgcggtgtccataacaaccgcgggcagccgggctggcacgccctcctgtggagggacttctggctcggccttggtggtttctggcacaaaccctctctcccccgcaacttccaactcttccttgggcccttctactttcacttctgggggcaaagcccggcccaaacccggctccacattaagctcttccgatttcaggtttggggcctcgggc

SEQ ID NO: 1419 - DNA, 120 bp, Homo sapiens
ggccgcatccccatttgggaccttgccccgactccgacctccggatctccagctccaccaaacctcgaagccaccatccgcccccaaactgccgctgcgccaggctttcggaggggagtc

SEQ ID NO: 1420 - DNA, 80 bp, Homo sapiens
gcccgcgacccagagcaccaggaggccgacggcaagcactgcggccaggcaggctgcagggtggctgcggcggcagcggc

SEQ ID NO: 1421 - DNA, 124 bp, Homo sapiens
gctctgtccttccccaacatccccaatccctgtacttcctctgctccccttagggttcgcggcgccccctgtgcgcggctccatggccagtagtcggccgggtggacgcagggcagccagcgac

SEQ ID NO: 1422 - DNA, 726 bp, Homo sapiens
gggccgggctaaaaaaggctgttagaacctttgggccgtgcccccattttccgtacatggtgaagaactgcagccgggcttgtgtgcacacgccacacactgggcgttcccggcacgggagaggcccagagtttccttcaccctgggaacagagccctacagccagggcttatatggccagcgggactccaaccggggtagccgcgaggaaggcgctggcagaggacagaaatgtccagtcacctccgctgtcaccacatcctgagcactcggccccatccccccacaggagggaagctgtggtctgacggaatgggcaactttcgcccctgtggggaggggacggggaaggaagaaagaatttaaaggaccggaatgcgagagtccaggtggccttggagaggaaagaggaacggtgaagacaagctgcgagagctgggagctggagggtgaagaggtgaacacttgagtggttagagctgtagatagacattgtggggaagtgtgccagggtggcttccagctacccctgacttagagcctggtggaggtgtggttcttcagaagtcagcaaagggctcaagagccccagtctataaatacagtcacacccaggagactaataatagtaaccccagccaccatgtacttagttttatccctgctactggctttattgcaatatttattttcatctacaatagttgcacatctactcaactatcc

SEQ ID NO: 1423 - DNA, 152 bp, Homo sapiens
gttggactgcgtggctagcttgggcatgggggcctccacggtcagtgtgccctcaggggacagggaggaggagaccttggtggggtccacaccggggggcagcgtgtatttccgggtgaagcatcgggagatgtagccatgctcgtcctgcc

SEQ ID NO: 1424 - DNA, 334 bp, Homo sapiens
gaggctgggggaggggcgcccgccattgcccaggcttgcttaggtaaacaaagcagccgggaagctcgaactgggtggagcccaccacagctcaaggaggcctgcctgcctctgtaggctccacctctgggggcacagcacagacaaacaaaaagacagcagtaccctctgcagacttaaatgtccctgtctgacagctttgaagagagcagtggttctcccagcatgcagctggagatctgagaactggcagacggcctcctcaagtgggtccctgacccctgacccctgagcagcctaactgggaggcaccccccagcaggggcacactgac

SEQ ID NO: 1425 - DNA, 410 bp, Homo sapiens
ggtcctccgggaattgtcatctggccccagctctgccccaccctggttggagggccccagccagggatctgccttcttggcgctccagtgtcctcatcagcgacagaggtgacagggctttcttccaaaggtgctagtggggattaaatgagatggcacataagaaagaagtgcttgggacactgcaagtcagatctgtgatgacctaaaacttagagccctgcgcactgagcgccagatgaccccttgcgagtggtctcacttaagccctgcctgtgacttgggaagcatctttagcctcatactgaacaacagtccaagtcttgaagactggatcccactggtcatccagtccttaaagcccaggctccgctttacgaacttccgcccatcagccactgtgcctgacc

SEQ ID NO: 1426 - DNA, 323 bp, Homo sapiens
gtttgtggagccatactgccatcaagcggaaactgtatctagaaaccggaggcagctgggcacaagtgctggggaaaccccacgagcgcaaaagagatggcggcatggagcccccaggctgaagcaggacaagagaggaactccaagctggcccttggcctgtgctcattcccaggatgcctccctggttccacagctctctccgaaaaaaagggcaggtaggggcgacccaccatgggttcccctggtcatctccaggtactgctggtcctgggttgccacgtctccagtatcccgaagctcctttgttccccgggaggatc

SEQ ID NO: 1427 - DNA, 167 bp, Homo sapiens
gcagggcagccgaagggccgcagtttatcgtgcgactgcaggtgcctcttgagcttgtaagaggtggtgaaggtccagccgcagccacccagggggcatttgaagggcctctggccctggctgctgctgtgcgtcagcaggtgcatcttcagctggtgcttcttggc

SEQ ID NO: 1428 - DNA, 119 bp, Homo sapiens
gacacagaagggtgatttctgcatttccaactgaggtaccgggttcatctcactagggagtgccagacagtgggtgcaggtcagtgggtgcgcgcaccgtgcgcgagccgaagtagggc

SEQ ID NO: 1429 - DNA, 601 bp, Homo sapiens
gtatgattgtggggtgagatgatcacatggggatgaagtaacttcttgtcatccaaagtataggtttacaaaagataagcttttacaatatagtgtgtgcatcagcagtttaacagacctataaagtaggaataaattctacccacaacctatgtttagcaagatactaatcagcagcagcagctgcagcagaaggtagttgcaaacaattaatagaaacaggacgtgaaactagacaaccggttagatgacaaattctcagaagagtgtaggctttaaccctaaagaggcctagaagagccactgtaagataagggcgtttatagctctatcttatccatgagaacaggcgcccctcatgcattcgtttataggctttccacaaaggtttcattccattcccagagctatgaacatctgcttttctgggataggaatcttggtgatgtgaatcctccagatctgcaaccgtttataggctctctgcagtgggaagaacatcacacacagcccaaccccacattgtctttgtgacaatcctgtatttaatattttatttacaatgattaagaacatttcattcctttgttctgtagcaacc

SEQ ID NO: 1430 - DNA, 3187 bp, Homo sapiens
gtgtacttaattacatcagaaaagacttattttccaaataatgtaatatttacagcttccagagattaggacatgggcatattttggaagccattgtcagtctttaatgcctatattcaagttcacggattctttttctgccagattgtcagctactgagcccctctatggaattttttatttcatttattgcacttttcaattccagaatatctatttgatgctttaaaaaatttctgtccctttcttgatattctctctttaatgatatatcgttttggtaattttctttcattgtttagatgaggttttctgtaatactatgaacatatttgtagcaggtgatttaaagtcttcatttactgcatccagtatctgggctttctcaagggcagtttctaatgatttctttttccctgtgtatggcttatactttttctgtttctttgactatttcatattttttgttaaaaactggacattttacattaaataatgtggcaactctggaaatcagaatttccctgccgctgctgctatattgttttgtttttgttgatgatgatgataataatgttgctgttgttgctctttgcttcatgaattttactaattatgtaaagtcttcattccctgtcaagtgcagccactgcaatctttctcatttagcttaatggttagcttaaaccaataagcctgtcagcctttgctgaagagttctgtgtaagctttggggcataccttcaatattctggcaggcagttgacaattcagccttagctttcatttctttcttgtgcagaccctcgtggccaaccagaggtgatacattagggccttctcaggtctttcctttgcagacacacagccctgaatatgtttatagtcttctagattcagaagactgtgttggagttttttaaagcctgccatgactaattcattctgtagattttcttaagtatttaaactagcctctcatctgacccaaatagtattactgcttcaggcagctgcaatattaaacaattgccactgattgatttcagtgaaaaccttgggaatagagcttttcctcctgagactgagctctaaataaggtcaaataatgacaagccctatgaatggggttttgctagagaacttcctgacaggtaaactggtgacaattttttggagacaggatttttgtttttaggaagtccaaacccagttggctagaccacttattttcccagctatcatggttgccaagctgctggttttcaaggctaccatggggagcatgatgtggcttgtataccctggcaaggggatagagctgttcaaagaagggtttttttaaaggcttatttattaaaggacctcaatccatgaaagggtgaacaaaacatcaccaaggattatggaatagcaaggctataattgagttctctttctccaatatgatcagctaactgtactagtccatcaagaacaaattgcaataaataaactgccagagctgcacatggcatctatatatacaagagggctcatgcaacaaccctcttttgttcaagaaaggcccacagaaatggaactttccattgaaaatacaacctaattctctctttcaccaagtccactcaacactgtataaaaaccatgaaatcatgtttgctttgtgtgtgtgtgtgtgtgtgtgtgtgtgtgtgtgtgtgtgtgtgtatgtgtgtgtcagtgaaattttgggattaaataatctttgggtaaatatgtaattttgtttccttaagaaattcagcttatacttttttgttgccatttgacaaaataaaagataatattcaattgttgtatggcacaagtgggtggtgtaagtggtagccaagggcagcaagagctgtcttcagatatggaaggctgccacagagaataaattgctgatgacttctaaatagattcagggacaccataaggaagacataacaaactcaaagcaagctaccagaggaagatttcagtttagcttaaaaacgtagctttctcccacactgaactacccattgttgtaatgtggtatggaagaaagtgagggccccttctcagagcttctgcatgggggttgtatgtgggttttgaaagcaagaaagaagaattttcttctgagtctaaggttatgggttcctatgtgcactgagcacttaaaaatacccaggagtatattttcctctcacatttaagttttcaatttgcttcctagaatcttttggagggaagtggcagtgaatgtggagtagagatataaataaaagttactccttagagactgttttctacttatgacatgatttctttggaatccttttgactgagtacccagtctaattgaggcctgtctctatgacactgaaaacagcaacaaccaaaacaacaaagcttcatttttatttccctcaacttcttcacattcttgagattttgaatgcatcaaccccatcttattccagatatcacaagatctttttagactctgtcaaaatgaacccacccttttcaatccttttcagcctggctttccaagccatctgaaatcaggcccagcccacctatccaattatatttctttttttatctgtcaacatattttaatttactcactatcaaaatatgcatgacacaatagcacagtaaactatatgtttattatattatgtaaatttataaatcacttattataagttgtttgctaatgataattgtcagctgtgtgcaatggcttgtgcctataatcctagctactaaggaagctaagataaaatacagacctttcattagccttaggccattctcttcactctccttgacacaacatttatagcatgaaaaaaaacaaagcattaagcaaattaaattaagttcaatgtgtgtgtatagtagtgtagaaaaggagaaagagtacagagcctggaatctgactgcctgggctcaaatcccagtactgtcattcactagtggtgtgacgttatgcaattacttaatctctgaggtttagtcttttgtcagtaaagtagagatagtaatgcctaactagaacggtttttgtaacagaaatctcatctgtcttcgctctagaagtcagatagaactgaaatgccaataggatggtcccttcaattccacaggagcagaagcctgtttgcac

SEQ ID NO: 1431 - DNA, 140 bp, Homo sapiens
ggcatgcctatattatgtgccttttgcctgcctccttccctcaggaccagcctctggaaacagaaagtggtggcggcatcgtgcatgcgtctgtcgcagagccccgaatgtgccacggcatcaccccctcgcccagcagc

SEQ ID NO: 1432 - DNA, 557 bp, Homo sapiens
ggttatgtaccttagagtcctagtccaggctttttttgtggtacacgccaggggctaaactctttgaaaataaaagctaatctttcttaatgaagtctatactccgtgccaggcaccatgatcagtccttcagatccttacaacagtcctgcaacatagagataactgccccggcctagatgatggccaagtcatttgcattcttgggcctcagttttccatctgtaacataagggagtctataaggactgattccacttcaggatattctggtactagaaagatttcaaagtgtcgttggtggaacccagctggtcggttgctcaggccagccagtcagagaatgtggttgcagggaggagtgaaaagcagggggcggtaaagggaggccgaggagtgagtcagtctgtcaagatggccagagccattgtttccttctccatctggctgttgcacaaggccttcctccatgtcacatggttggtgagatttgggggcagacaggaggtggaggggctgaccccataactaggaagacacccccactatcttgcacc

SEQ ID NO: 1433 - DNA, 122 bp, Homo sapiens
ggagtttcgctgattgctagcacagcagtctgagatcaaactgcaaggcggcagcaaggctggggtaggggcgcccgccattgcccaggcttgcttaggtaaacaaagcagccgggaagctc

SEQ ID NO: 1434 - DNA, 1569 bp, Homo sapiens
gtctgatctcaccatcatcacttccttggtaaaacagaacctgggggctcccaggttgaagcaacgaatatcttggggaggaggcatgcaggagagaagctctcattcccagtacccccacagtgaactccatggtagggcttggcctctttctttttgcccctgctgccacatactacatgccccagcgatgtgtcactctctttttaagactctggcctgagagaggcacaaagcctatccttggctttccctgggcacagtagagtgagcaggaagcaactgcacaaagaactttctgaagcagtctgggagaaggagagggacatgccagaaacccaaacagtccagctttcacagcacatgtctcagagccaaccacagccaagttttctctgagactcacacattctgtctgtactatattcaggctccaaagcagcagaaggctggctccttccctctccattcctgacctgtgctcacagggtaggcacctcttacctccaacctcagggggcaagtgtttgagggctgggttccctccctggccagtactacagaaacctgcgtcacagtcttcttggagtcctccccctcagctctggttccctctctgaagaatgcatttcttttccaggtgatccttaggactcagttgttgattgataccatttattaactgacagttcaagtgagtgccaaccccctacgttgaggggtttggctatgacctttataggccccacagtctgacaacactgtagccctatgagacctttaacatccaaatatcaagagttacccacacatgtacaacaagggtctgatttcatcagagttggcatcttaattctctgtactgtgaagtgtggggacttgcattcagcccaaaacaataacctttattaaaaactctttggatatacctgaaccactgtactttcatccttgctatgagaggcataagaaatagctttcaatttaagcaggaaaaatgaaaattggaaacaagatttccagtgaatcttgaaactgagagagctttgaaaattaaagaccctctacctatggcaatctttaacataggaaaaaatggtcctccaaagtataaactagaagagaagcttttgtgggaaggaaagaaatgaatgaggtaatctcaatgtgactaaaatcctaaagtgcttttctccatggcttttccatcctagagggtgtctgaattccctttgctcaagccaccctctctatgcatcaaatcatagaatcacaaaaccttggatgtcaaaagctttagagatcatcttgtggctatatcaccataagcagtcattcaacttctccttagatatctgcttgaagataccttcattgagaggaattcattatctctggaggcagacatgagagaataaccttctgtttctacatggtgtgggtcatgtttggtattaaaacacagtcatgctagcagattcattaaggtaaagccatactcctctaatggaattgggatggtctcactttctcacttgaaatgtttattaattaattaattctaaatac

SEQ ID NO: 1435 - DNA, 855 bp, Homo sapiens
ggtgtaaaaaactaattagggaagggtaggtatatgtaaaataggtgaagggtggggatcaatcagaggaaagcacgccaaacaggaagagaggttctcaatccggtctgtggatttattcgagacttgtagcttggttttcagactttaaactgtctttggtttgaaggtcaggtttcacaggggacccgcccctgtctgcctagggatttgtctgcctcctgctgctatcatcaggctaatagtattgttcaactatggattcgttcataatttgagtttgcaaggcaaaacagtatagatgatgtgagtccatgggcaattattaggacaactgcacccataaaacttcagggtatttggatgaggatggctacagtaaaaagtgccatgtggctgcttacagaagaataggcaatgagatatagaacagttaaggggaactataatcttgtaacagggtctacatgattttgaagcagtaggcagcaaacaactatgaggaatcaggtcagagggcaagctgacctcatgaattcagcatgaagctgaatttgctgcgagtttggtttattttttttctctccctcccttcttccctgattaattttatgaagtttatagggattgtttcaattgaagcttacacagcatcctgaactacagaaaggaataggggcttggggcttcctgggggctggtggcaacacaagagttatgggagagcaagggaaggaaatgtgtggtaacagaggttgtcttgttatgcagataaaaagtctttcaggtaataaaacttctctcaaagcagctctcagaagaataggtgattgtctgggtgtggtgtcagcctcc

SEQ ID NO: 1436 - DNA, 584 bp, Homo sapiens
gggttgggcaaaattcccctcctcctacagcttgaaggggacataaccgatagcccgggggtttttgtggtcccttggagatctcttttcttgtttccttctgggtgggggagattagaggaggcttatcattaataggaaggggagctgtaggaaggctaggatatggaggtaagctgagaggtcctcctgtgggatgtaaattgcaagctttgcatagttgtgaattctccttcgatgaaaagaaagcttggacataaggtatttcactccatttgccttccctcttacagaaaaggtcaagctgcaggatagtattgtaatttatacttccctcaggtggccatttttccccatcagagagagaatattggggccaggccgtagtgcagaaaaaaataagccacttctttttcagggtttgtgggtcaaattggtctcaatggcttaggatgcatttcaagggtgagcctgttgatgcctgagtgtttcctatctgaaagaaaaaaccacccatggttttggtttgtttgctccccacccccaccccgcccccaccccccgctggcccaagaacccgcaac

SEQ ID NO: 1437 - DNA, 562 bp, Homo sapiens
gccacaagtcttttttcgaagtctcagcctgtgctcagagtcagggtcaaagttcaaacaacgtcaaagtttatttttgaaataaaggtttatttcctcacggaattcttgaagggtttgccccatgtgtgtgaagcattgagactggactgaaaggaatttattttaggaccctgagccgtctttggctcacacgcttactgccctaggagatgattgatggccatgtaagtttccagtccacccttggaggcccagctctggggttacatccctcccactcagcgaagcctctgttgcctctagggcagaagcatgctctttcctctcaaatcttgtagcactgatccactcaatgtacccactctttttttttaactttgcatgcttcattaataatttatctaattctatatgttttgataaattgttaataatcattataaagataaactcaatccacaaatccctctcttttcagagtgtagcattgattagccttgatactgtctgcattgttaattgaattataggctctatctgactgaaaagctggcagttc

SEQ ID NO: 1438 - DNA, 162 bp, Homo sapiens
ggagttcatccaaggtctccgtccaagctatgacaagctacatcctcgctcggtgattacgagagacacccctgcagttacctgatggcacaggatggtctgttgcaccagtcgagcgtagccgtccagccggaccccggagttactccggctcctcatggc

SEQ ID NO: 1439 - DNA, 567 bp, Homo sapiens
ggtacttaaccaccagaggcaggctctcaataaaatctgcgtctgaggagtactccatcaaagactgcggagaggctgtggctgccacagcgccgagtaatgggcccatttcaccggctgtgctgtgttctccgagcccttccatcattagctttttggcagggaaacactcaccgaactgtaggcgatggcttggcccgggccgccggcacctgggggtgctaagacggaggcggaacgaagcagctacagctgctgtggaagctggcctggggtggcggaagccgtggaaggcaagagtagcgggctaaagggctttccccactagctgccatggcaaaaggaggaggttccacaatccgattgcgcagaagatgactctctaaactcttttttgcttaagagctcaccctatttgctgagtagctgtgattgacaaaccgtcgtccaataaatgattagatccatcacattactagtgccactcaccttcctggcggtagcagctcccaaagtttctagacgggaggggcttactgcaaatcatctggtcggggagaagcggtc

SEQ ID NO: 1440 - DNA, 1345 bp, Homo sapiens
gtgtacatacatataaacacacacatacacacttacacagctgttcccggtccaaactgagggtcagcctacttattcctgctacccggtaatgagatgcagatgaactgggaaagaagagagtttatataagctcagaaaactttgtaatttttacttggtctgccaatattttcgaggccttctccctgtggagagactgtcgtcagaccaactcaaaattacaaagttttccaaagcttatataccttttaagctatatgtttacatataactttgcattcatctaaagacataagttattaacttcttttaatctacaactaagttctcagttttgaagaccttcctctggagcctcagtaaatttacttaatctagatgggtccaggtgcttggggtgattacccttatcttgtctgctgtaaatccatagaggttttagaagttcctttagaccaccagtaaaacttgtttgtggaggtctggggagtttcttcagacctccaataaaaacttgtttaatcccaaaggggtcctgttaagaattcctttatcttgtcatgcttcaaggcccaggaggacataggcaaaattcttggtgggcttttgttaaatcccagcctttgtataagggcactggctctttcagcttttaatatttaaccagtcagtgctgaaacagttgttaaggaggcctccctgttcagctgtgagacctgccctgccacacaaccaaaaatcctatagcttttacttcagaactctagtcatgagatattaatacaaactcattggtttacaaaaacaataacaaaatgaaatggatggatgcaaatggtggattttatctcagtagaaatgtaacagcagacttaatgcaggcaaaaaagaaagcagagccatacacagagaacttaggaactttatactcacaggtggacctttgcgatctgaattttccttgccgtaattgtgcagaaaaggaccacagtatgtcaattttacacaaacattcgcaagaagaggcgccataaaaccaacagagtgcctgaaaggaggtcattcctgtttttcctctttcttagatttattttttgaaggaaggaacttagctgtggcctaaggtttcagtggagtgggtccaagtatccgggttgtgggcaggactccacagtgtgtcaccacagagtaatttccaccttatgtgtctcattttctctctctggaggtctagcacctatgggagggtcaaagcaaagtgatcagctctaataggcatttcctggatgagctttttaaaactattttgttgtaggttccctgtagggctgctggttgtcac

SEQ ID NO: 1441 - DNA, 402 bp, Homo sapiens
gtgagtgtataatcagagaggtgtccctgaaatgattaaacaccaagggaaggctgccttcccagtccgtgaccggcaccggagttttgggttcacggataaaacatgtctcttttgtctctaccagaaaatgaaaggaattgaaattaagagaagggagagattgaagtgtggttccaagattgaaaggagaaagaggttgagggataatgagggaggttggagaagagagtaaaaataggcctcttaccggatttgaaattggtgagatgtttcttgggctggtcggtctgaggacctgaggtcctaggtggatcttacggagcaaaaagcaggaggacaggggattgatctcccaagggaggtccctcgatctgagtcacggcaccaaatttcatgcgc

SEQ ID NO: 1442 - DNA, 803 bp, Homo sapiens
gcgaggcaggatccaagcaggggagaaaaagagaccaaagcacaaggcgatcgaggctggcacagaaaaggctgatccttcttgcaaggactggagaatgcatttgactgctggctgatcaatctctaattggcgagtgcgcgtcacaaggctcagccctggctccacagggagccacgaagctgacttaactgatacaaatgttcccacctctgccccacccccaagtccccatggttccaccatcacctgattttcatttggacttctttaacagctaaagtagatataaatggctaaacacagatccccaatcccccaccaggcgggacacggccaattctataatgttgcagccagaaggctgtgggcttacaggcagccaaggggagaaacagaacccacaccggcccaggccgatctgcaagaaaaagtgggaaaggagtgactcggatgcttccgaagcacgcgagcgtgattttggatggaggccggcgggcgactttgcctagctgctgccggttcctgtaagggacatttttttctgagtaaatggcgattcctctttcatgtagcatctgcttggatcacgatgctaattgtaactggaaaggggtgttttggggagtgtattcaggagaggaagaaagaaaaaaaaaaacctagattgctcaaagtttctgcctcttttataggacgtagagcacacatttttcccttaaaaaatatgtttttgctattgtgaacactgctgcaataaacatacgtgtgcatgtgtctttatagcagcatgatttataatc

SEQ ID NO: 1443 - DNA, 561 bp, Homo sapiens
tccgtccccctgtctgtttttctttttgctttccggggcacataatctccagccgggcgcttttcggcggcccgcggctggccctctggctttgcctgggaggctggcttgccctcgccttgtggcttgccctcaccttcggacttgccctgcttttcctggcttcccttatcttccagttgtccctcatcacctggctctccctcagcctttcgctttccctcgcattctgtcttcccctccgcgtctggcttttcttcctcgtctgactttccttcatcatcaggctctacttcatcttctggctttccctcgttttccaggtttccttcatttttattgtagggtttttccatgtcgagatttctctttttcctgtcctgggggatgacagtggagggaagaggagacaaataagagacatgggagactgagggcatggggtggaatgcaggtctggatactacttgcatctcacccctggtgagggttcccctaagctggccgggcctccaagagggccttctgcccagcacgtagcccaccactcctcccacacac

SEQ ID NO: 1444 - DNA, 140 bp, Homo sapiens
ggggtggtatcacttgcccagggtgccttggaaaccaagacggcaggaaacgcaagcagagcctcaccattgggtgacaaaggcaggaggctgagatagacgtaaggaggcttcatgtccataccctcccgcccaggctc

SEQ ID NO: 1445 - DNA, 324 bp, Homo sapiens
gggcgttggaggatttggcattggtgcagttgtgatcctccttagggtctccgctaaccaccggggagccacacgatggctcgctctcagtccgcatccggcagctggtgatgccgtacatcatggcagccgtcatctcaatgggactgatcggcagctgccgcacaccaggaaacagtcctctcagctcaggacccgcgctccgttttgtatcactcctggaggaaaacctgcttgtatttcagggggagtcccatggccctggtagcatcaatgtcaggatcttggagaagggctccatttctcttgaagaaggtactgccc

SEQ ID NO: 1446 - DNA, 265 bp, Homo sapiens
gccgtctgggccctgtcaccgcccggcccccacagccgcgctgtcaatgctagccgctgctgcgaaggcccgcacagaggccagcaacacaacacccatcagtaccctgtcgcagcagatgagtgtgcaccctactatgctgtagctgcagatgctactgccacatacgaacaaggatggatcccactgctaccgccctaggaagtgctttggctggcaccacccatcgtagtgtgataaccagcagtctgggaacacctcagcc

SEQ ID NO: 1447 - DNA, 727 bp, Homo sapiens
gagccaggtggggaatataatctcatgctgcaccattttttaagcctgtcggaaaagcgcagtattcggttgggagtggcctgattttccaggtgccgtccgtcacccctgtctttgactaggaaagggaactccctgaccccttgcgcttcccgagtgaggcaatgcctcgccatgcttcggctcgctcacggtgcgcgcacccactgacctgcgcccactgtctggcactctcttgtgagacgaacccggtgcctaggatggaaatgcagaaatcacctgtcttctgcgttgctcgtgctgggaactgtagactggagctgttcctattcgtccatcttggctcctctctaaattattctttaagttctgtggtacatgtgcagaatgtgcaggtttattacataggtatacacatggcatggtggcttgctgcacccatcaacctatcatctacattaggtatttcttctaatgctatccctcccctagccccctgtcccctgacaggcaccagtgtgtgatgttcccctccctgtgtccatgtgttctcttcctaatgtattttaaatacctgagtttcctttttgtgtatggtcagtacagcaaacttgaatttctagaacctgatatagtggtgtcttgaggtttttgtttctcttttgttcctaatagtttttaaaaattttgtagctctcttcactcccacagcactctacatattcac

SEQ ID NO: 1448 - DNA, 535 bp, Homo sapiens
gtttttgactaattctctgtgaataaaactgttcacctggtcatagaaatcatgccctgagaatgtagcttttcaataagctttcagacaggtcgaatagagacaattttctgtgtatgaggcttctggattgctctaaatccattctgcttcctccaatggctgctaggctataggattttataccacagtagtgaggctattggctgttaaggataccagggagctggggattagggccaattaaaacaccacgaagctcattgttcttactgaaattcagccacttttcttgaataaacattccttgtatcgttgcaagcctttagtttgtttccagagttctgaaaaagttgactttggcagatttttgccaatgttctcgttgcttttatggaagagttgatttttgaagtccttactccaacattccagaagtgccctcttggatgaatgatcttaaacactttagttcaacatagaataaatgtgtgtttgtgtgcatgtgtgtgtgtgtgtctctgtgtgcatgtgc

SEQ ID NO: 1449 - DNA, 267 bp, Homo sapiens
gtgagcgacacagaagacgggtgatttctgcatttccatctgaggtaccgggttcatctcactagggagtgccagacagtgggcgcaggccagtgggtgcgcgcaccgtgcgcaagccaaagcagggcgaggcattccctcacctgggaagcgcaaggggtcagggagttccctttccgagtcaaagaaaggggtgacggacgcacctggaaaatcgggtcactcccacccgaatattgcgcttttcagaccggcttaaaaaacggc

SEQ ID NO: 1450 - DNA, 226 bp, Homo sapiens
gtacgtggggaggcgcgcgtgtgcgggaacgcttgtgtgcgtgtgatgtgtgggggacatgcgaagatgtgatttacacaggtgcggacgtggcagtgtgcgagtggtgacatggagatgctttcgagcgtgaagactcaccgagaagcccgtgggggatgtgtgtgcgtgtgcacgtggaggtgtgtgtgaggggatatagatttattaatatatatgcgtgcgc

SEQ ID NO: 1451 - DNA, 461 bp, Homo sapiens
gcggcgggtgttgatgcgatgtgatttctgcccagtgctctgaatgtcaaagtgaagaaattcaatgaagcgcgggtaaacggcaggagtaactatgactctcttaaggtagccaaatgcctcgtcatctaattagtgaggcgcatgaatggatgaacgagattcccactgtccctacctactatccagcgaaaccacagccaagggaacggacttggcggaatcagcggggaaagaagactctgttgagcttgactctagtctggcacggtgaagagacgtgagaggtgtagaataagtgggaggcccccggcgccccccggtgtccccgcgaggggtccagggcggggtctgccggccctgcgggccgccggtgaaataccactactctgatcgttttttcactgacccggtgaggcgggggggcgagccctgaggggctctcgcttctggcgccaagc

SEQ ID NO: 1452 - DNA, 666 bp, Homo sapiens
gcatcctggtgcctatctctggggcttccacggcctgaactggccacagacccacttctgtcaggcctccagagagctcagatctgtccgggcaccagccctagtcctgcctcctcccccacagcactcccaagccactccttcccaggcaagcatagggaagggtgtgcaggattgacaaatgatttcctcttgatggcagtattgctccagagatgcctacctgcccttcccccaggtccactccctccaccctttgctgaggaaaaaacgccaacatgctccacacatggccgatcacaatcttggccactttgggccagctctagcccacctgtggcaccctttccctagggagactggcctcagcggagtcctcctagcctgccttcctgacaaacaggaaagcagtcccctcggaccgccctagggttggacttgacctaaccacatccctaactatgcctttagaatgggaggatggtggagcgctcaggaaaaagacaagagactgggcacagagttgtatctaagccactccctgcctactgagagacatttccacttgggtgttcccatgagtcactacaagaccagcttgaccacaaggtcaaaggcaaccagcatcccacaggccactggggtggactaaagagtaaggtgaac

SEQ ID NO: 1453 - DNA, 1305 bp, Homo sapiens
gtgaaatgaaaggcaccacagcttttatcttcctttaaaggaatatttgatccaagtgcttgtctttctttaggccaaattaattagagctctttttacagacattacaaacaacacacacacagacaggcagaagaaaacccagtccccacaagatcctttttcacaaccaaaactttacagagaatataaacagtgatagttgggggtcctggcctagcaaaatgccttctaaaaaaaaaaattggcttaaaacataactgctgatggggtagataaggggaagaaaaaaaagtttaaaaatgcctggggaagaacctcttactcttatgcaactggttcctccacctggagaaaagcttaattactgtctgatggagttaaaccccttagctacggaaggggaaggcgcctggcaggaatggcagtgcagggcccttgggccatgtgtcccagctccggcaggggtggggagtggcgaggggagaaaggagctgcagctcgctggtccatgcagaaaaagaaaggaaaatgccatgaagaccgaggctgaccttcccaaaccccaggagcaatgggggtaggagcaaggtctcccctatgctcagaactcccaggatgaaaaggcttacaaatgacagtgagaggttttgaatccccatttcactcactgcttcttgagcccccatgttgcatgccaaaaatgttgcaagactatttcttagatcagctaaagaagtggtccttgtcacacagctgcaaatggtgcaaacttctgtggcttcaccccagtgtgcacttttcccagtgcaaagcccagatggagttttgccaggaagcccttcccacccgtctctctcaatatgtgcaggctttctacatctcgcaaagcaatccagacctttgctgacagtgtaggtttgatacaggcctcctgtttgccatctcagagaaggctgcaagggcaagctcagggaattaaagatatgagtctcagattcacccccagcagaggcaccagctccgtccagccctgctcctctgagtccaccctgacatccctatccagcttcagcctctcacttgccccctccaaaaaatcctcaccctaattcagccccagtctcagtcttgcccttgcaacagatgcccagtgaatttggaccaagtaaggtccaggtcgccttctccctataagacttaaagtaaattaagggggatcttggaaagttttcagatgaccctgatagatatatagtggctttccagaatttcacccaaatatttgaactctcctggagagac

SEQ ID NO: 1454 - DNA, 689 bp, Homo sapiens
ggtaagccaagaaggagtcagtcagagagccttgggccagagttccaggagctctgggagtggctgccaggtgagttgaacagtccgattttcagatgggacgaggcttaggaggaatcccgggctgcgggcattccttggcccagtggccagatttccagcatgtgtagcaagttcctgggggaggagtttctggaggaacgcctggctgctacagttcaggcgtttggaagttcttgtgtgctggagatgtggctggcgtttgtctcacagtggaggcaaggaattgcaacttttttctgttattgcacaccttgaaggtgaggttaattgagtcctgttgtggggtttgagggccagattccagtttttggagatttatttaatgtggggagcagattgggtaatacaatgtatattgagaataagatggccttttgaccttttagggtctagggctgtaaagcgtctcaggtttgctgccaaacaagtcatgaactgggctggatttttatatttgatgaaaaagagcctaaacgctatctgatttgggataaagaaaaaggagcattaaccttgactatgcctttagctccagccacctttttaagagtaaattgttgggctggtgggggagggctagtcacagaatgaaactgtaagctggagcaggtgtgaggtggggaggc

SEQ ID NO: 1455 - DNA, 618 bp, Homo sapiens
ggaaataagcaattggggggttcttgccccctaggaaagtgggacttgccgctaagggtgaaggagaaggggttgaggggtacttgcccctgccccaggaaagcgggacttgccactaagggtgaaggagaaggggttgaggggtacttgcccctgccacaggaaagcgggacttgccgctaagggtgaaggaccaaggcaggcgtccctgtgtggtctgacacccttgaaatgtgagtatataatcagagaggtgtccctgcaatgattaaacaccaagggaaggctgccttcccagtccatgaccggcgccggagttttgggttcacggataaaacatgtctcttttgtctctaccagaaaatgaaaggaattgaaattaagagaagggagagattgaagtgtggcaccaagattgaaaggagaaagaggttgagggatagtgagggaggttggagaagagagtaaaaagaggccgcttaccggatttgaaattggtgagatgtttcttgggctggtcggtctgaggacctgaggtcgtaggtggatctttctcatggagcaaagagcaggaggacgggattgatctcccaagggaggtcccccgatccgagtcac

SEQ ID NO: 1456 - DNA, 608 bp, Homo sapiens
gctgtcccccgcccacccccgggtcattcctcgccgcccgtttttgcggcgagagcaccatttgggcggttaggagcccctgcaaggccggctggcgttctgccaccctccactctgtggtgtctagggggagtaggtcggctgcgcccgccacttactctgaaatcttgaggcaagcatgaaagctagccatggtgctgctgagggagccgctggccggttacgtgccttgcctgctggggtgcatgggagcccgcgctgtgggcatgcccttagaggctgccacgtgggggcagctcggcacttcaagcgcccacccgcacgcagccccagacccacaggccgaagcaataaccagccagataaagtttcttctccaaggcctctcgctgtcttctgatctcagtccaaaaagggctgggcttgttccttacatggttaggaactgttaactccccttttccctctgtctccatcttcccgccacaacagcatccttagagcaaaataccagatgctctttcttagcctctctgtatccctgcagagctgagcgtgagaagtaatttggagatgaaaccctaaggaaagagtagaggcttttatcc

SEQ ID NO: 1457 - DNA, 186 bp, Homo sapiens
gagttccaaagctacaggactaaggagttgggagcagggagcgtggtcctgcttgggagagggcaagttaagcttccaggggccatttctgggcaggccgacgcgctgggtttattaggaaacattcgctagaagaatgagttaagattgtaaaccaccaatgcagagaaaacgcctaactctgcc

SEQ ID NO: 1458 - DNA, 992 bp, Homo sapiens
ggaatacactgctaatatacttgcattacactgggggtgtgggggggcaggtttgcaaacaggaaatttgtttaaaaattggaataaaaaagaacaattttgaaaaagttttcacttaactaagaagggtgaaaaggttaaagaaaaattgcatacactcaaatatataccttgaaggtatggcacaaatggagctctatgagggaatattctctttaggaatttctgacaactaagaagttttttttatgttactgttttaaactggtgggttttatgtaatttgtttggtggtggggtggggcacgctcaatttagaccaggttcttacctgtgctaatttgaaatggtttttcattttcccaggcagtggtgattaatttgtaagtcatgagatcaagaaattactaagattccttcagtattattgactgagtatattttcaaaacaaagagaaaatccaggattaggttatgagcagtgctgtgcagttcatgtgagtgcagtgatgggccccccatgactaagccttttttttcagaccatctttttcactctcaagagttttcagaggatgaagtctggcccagtggctcacgcctgtaatcccagcaatttgggaggccaaggcaggcagatcacgcgaggtcaggagttcgagaccagcctggccaacatggtgaaaccccatggtgaaaatacaaaaattacctggacttggtagcgcaccactgtagtcccacctactaggtgtagcatgaggcaggtggatcgcttgaacctgacaggcagaggttgcagtgagccaagatcgtgccactgcactctaaatctgggtgacagagcaagaccctgtctcaaaaaaaaaaaaaaaaaaaaaaaaatttcagaggatgaatggccccttaggcatcctttacgaaacctgattaaagatccagcctgctcctattgatgtagttacttcagactgaagatgggcttttcaaac

SEQ ID NO: 1459 - DNA, 1456 bp, Homo sapiens
gtaactacaaatacatactgcccagaaacagttttcagaggaaaattgttcccatttgcctttttagatgttgatttatttgtgcattccatgtatagtctaacctttttataatgttactgtagaggtaaggcaaattctcttagaagaactgtattagacttattttgtggggtttctaagtctcaaagggcttaatttgacctatgtatgtccaaaatcatgtaataacaagttcagctgtattgtgtattattgatttctgcttactcactgtagttttattgcacagtgggcttagggaattaatgagttttatgttaaatgcttaaggacaaaacgataaatttcaattctgcatttcagaattgaagaaaaccccaagtgtatatggtttaacctcttatgtgagggtttgaattagttccttttacggaattcctggcaaggccattcaatcttagattggattaaataaatcatagaatttagagggaaggaggttgaattggtcagattccttgcaggagacagataagactctgaggacaaatttgaggagagtttaataaaggggctatatacaaaggtatggggagggatttgggatactaagaagagatagtgatccactctcaataatatggaactattatcttttttaagcctgaagagcaaagagagaagcagtttctggaactccaagagttcctgataggaactgtggcttttggtagaaaaacacaactacagccaacctgagatccagcaggagtgagtaccaggggaataaaatctctgcttccacatcctcattttcctcctccattaactctccagttatttccgcagtccaaaactaactaaaatccacaggacaagagagcctagttaatgtggtacataaaggagttcagacttgttggtaaagggcagagtaaagagtagtttggaagagaagatattcaaccgaaaggtggcagtctctctttaccttatcagagcatgtctagctagtgtagtaattaattctcaacaaaaaagggccacagcgaagcaaatgttttcaaataaagcaaaccaatataatgagaaaactcaaaggcattccatatgaaaaagtttagaggaagtatcactgttaatgctggtaaagaaaagatttgaggatcaatataacatggtggtagaaggtatagactctgaagtgagctctgaacttcctagctgtgttgcctgagttctctcatttgtaaagttgtggttgactcttgtatctactttgcagggttgttatgaggattaaattactcgttatgcaaaatacttaaaaaagtgcttggtacatagtaaatgctatatatgttagttaaacaattggggagagtcatggtagagaaatttgagttggtctatatgtcctgaaacagttgaatcaagcccactgaatgaaaac

SEQ ID NO: 1460 - DNA, 98 bp, Homo sapiens
gctcttggcgcctcctaggcctccgtgcccactctggccgcgcttgaggggcccttcagcccgccgctgcactgtgggagccccttcctgggacggcc

SEQ ID NO: 1461 - DNA, 606 bp, Homo sapiens
ggagtctccctgattgctagcacagcagtcggagatcaaactgcaaggcagcagcgtggctgggggaggggcgcccgccattgcccaggcttgcttaggtaaacaaagcagccgggaagctccaactgggtgaagccaaccacagctcaaggaggcctgcctgcctcagtaggctccacctctgggggcagggcacaggcaaacaaaaagacagcagtaacctctgcagacttaaatgtccctgtctgacagctttgaagagagcagtggttctcccagcacgcagctggagatctgagaacaggcagactgcctcctcaagtgggtccctgatccctgacacccgagcagcctaactgggaggcaacccccagcaggggcacactgacacctcacatggccgggtactccaacagacctgcagctgagggtcctgtctgttagaaggaaaactaacaaacagaaaggacatccacaccaaaaacccatttgtacatcaccatcatcaaagaccaaaagtagataaaaccacaaagatggggaaaaaacagaacagaaaaactggaaactctaaaaagcagagcacctctcctcctccaaaggaac

SEQ ID NO: 1462 - DNA, 832 bp, Homo sapiens
gtgaagacatagcaagaaggcagccatcttacaagccaggaagagaaccctcaccagaacttcaccatgctggcacactgattttggacttccagccccaaaaagtgagaaaattaatttctattgttgaagtcacacagtctctggtatttttattatggcagccaggctgactactacagtgcttaatgcatggtgagtgcatttttaaatgaatggaaaaggaagaaagaaacagaagaggaagaggtggaacaaatggggagaaagatgaagaaagcagaagttaagaatgagagaaactaaggaaacaggaggaagaaggtagaggatgggaatgagctcatgaaggagccagtatctcagtggagaccatgccagtgtgagggaactactgccaactaggaggcaggtgggtgcaggctccagggccagtgctgagcatccaggcacaagacttttaagagagagtgtgtgtgtgtgtgtgtgtgtgtgtgtgtgtgtgtgtgtgtgtaattttttcccctagagatagcctagaggggccacctttgtgcttttctcagaggctatgtgtcctcattggctgggtaacagctgggtgcccttgcctccccggccaaaggcagccgccgtccacacccagctgcctgagggacaaggagggtgtttacccaatggcctgtgtccttaaaggactctgctctcagttacacagcaaacagctggcctcgaaggggcctcgtcctggccgccgcgagcgggcggcttctgcagcgtttaagcttctatctaccatgaagatgcttcccccaccctcatgcctcctccc

SEQ ID NO: 1463 - DNA, 524 bp, Homo sapiens
gcagagacggaggttaagggtagtgccgatgggacagcaaagggtggaaccagcctacacacacgcgcgcgcgcgcgcacacacacacacgcgcgcgcacacacacacacagtgagatgctgaagcaacactagctcacagatccgggtgctcaccccaaactaggtctgccatgggcctctccagccctgcttgcattttaaaatcaaccgcaacttgagattttactctttatcggcataaaaacaagtcatctgcctcccaagtctcattcagtagccagggaccccatatctgtcccagtcaccctagcctgcatctctaagtctttcaaatcaaaacacacaaacaagcataaaaagcatgttgtaaaggataaatgtccccaagaacgtattatcattttgcagcacctaaaacaactaattgacattaatggagttaaagaaactccactgaggacataaattcttccaggtaggtaatgaagtaaagattgccaaaaaggttgtaaatttttattc

SEQ ID NO: 1464 - DNA, 374 bp, Homo sapiens
ggggggtggggggtggacagtggaagcactccttcctcccatttacggatgcaagattcaccctgtactttgcagctcatttgtaacctggtcgctttagagttggtccagctccctgcccacctcacacctccacccccagccagacgggtcctctctgtccttcctcagccctacactgtcttcgcccaagtcagcctgctctaaatggacaaggtcagtgatccaagcagaaactgaaatagtaacaatcggacagtgtcaagagactccggcagagatgcctcggagcgcccggcctcctcctctgccttggcacagatgttcttattgtcctggaaagaaataccaaattccctccccaagcgtgaagc

SEQ ID NO: 1465 - DNA, 268 bp, Homo sapiens
gaacttgtttttctgcttcttttatacctccagagcacctgatataggactggctctgtacatgctgggcattcccaggccagggtaaccagacagacccatgatacaacctgccagcgaatcccggaaactccaggacaggagacacttgcaggctaatggtggtgtgcaccaccagagtcttcggcagctcacggcccttctatctgccttaagttgctggggcagagagcagtgccaaggcagagaggaaggagaacatccctcc

SEQ ID NO: 1466 - DNA, 349 bp, Homo sapiens
gaataggaacagctccggtctacagctcccagcgtgagcgatgcagaagacgggtgatttctgcatttccatctgaggtaccgggttcatctcactagggagtgccagacagtgggcgcaggccagtgggtgtgcgcaccgtgcgcgagccgaagcagggcgaggcattgcctcactcgggaagtgcaaggggtcagggagttccctttccgagtcaaagaaaggggtgacggacgcacctggaaaatcgggtcactcccacccgaacactgcgcttttccgaggggcttaaaaaacggcgcaccacgagactatatcccacacctggctcggagggtcctacgcccac

SEQ ID NO: 1467 - DNA, 751 bp, Homo sapiens
ggtgtggctctgggtcagggcgccaagggggaaggcagcccggacctgctctgaggccgggcgagtggcgatccacccggtcccatccttcagcaacacaaactccttagttgagccagaagggcttctgcaccagagggttaagttcttccacggggccagaggaaagttggtctctgcccacagctcaggcttaggggttggcatgactatttctagaaacagcagaattaatgaagccatcctcccgcctcccttcccctccctcctccttgcccttgaaccctctacccagatcacactgcccacctccccttgcaacccaaatccaaaccctttccttctttccttccttcctcaggtgctggggaaaggggaagctggtgtcttatagctgagcctcagaaaagtgcagaagcttggaggaaattttgcaggcagaaaggcaaagttggaggctgaattttgccagcagctttagcaagtgccccttcctggctgcccttccctcccaaccagccactccctggccaatgacactgacgctctgtagttatttcggatctccagggaggaatgtcccagtctggagcaggaaaaactcaccagtctcttctatcaataccccattgcacagtcctgcaaaagaaattgctgccaggactcggccccctcccccaccgggacttcaccccggccttctgcccggggccccttcccccacttgtactcaccacagcagagaagggcc

SEQ ID NO: 1468 - DNA, 1188 bp, Homo sapiens
gttttcaacttccttctttcacttagcttgtttcaaatttcatgtattggttatctatctctttgatatctacctttgttgttgtacctgcatccacacaatttatcaccttaaggagacaattttatgccatgaaacttgctggacctgtaactgtgtgaagtaaatcatacccagatagactcagtgaggagtgtatttaatttctgaaagaacaagattcctgatgaacctgggtggtttaggcctcattttgttttcacacggagtaaaaaaaggaaaaattcaacagtaagaccaggttgcaccaaactggacaaatctccaggaagccatgttgggtggtgcctttgtctctgggtggcgtttttttcagccaggaagggcgggagaaaagggcgccaagagagggctttcttgaaaatatggagtactactgccaccgtgaggaaatcgtttaataacgcaatacgccattatagcttctttccgggaagcctggctgtgggggaaggtctgatctgtgcggtggtggaagaggtttgggctccaggctaggtcttcttggcttctcctggaactcctgaagagaaacctgtacattggcgatatcttggtgtagaacctggagagtgaggggcttgcaatgaagcagcagctgcccagcggtcctggcacaggaagtcgtggggcggggtctcggttcctagtgtgggcaggactgcaggaacccactcaaacacaaatggaggctcttgggggcatctgtctcatgtaattgccccttggagcaagagtcagctggctttcatgtgctgtcatcttgctatgggtctttgggtctctggtagcataagtaccgcgcaaaatcaacaaaggtattcaaagggaagtttacaggatttgctattagaaccttcactctccaggttctataccaaaatatcgccaatgtccatgtctcttttaaggccttagacaagaaggcaaggactcccagcctggagcccaagcctcttccacttccccacagaccagtccttccccaacaggtagtcctcagagaacgctgtaataatggcgtagggattcactaaacgacttcctcgcgatggcagtagtgctccagatatgccaagaagccctgtctttgagccaaggtcttccgcccttcctgtctgagaaaac

SEQ ID NO: 1469 - DNA, 1126 bp, Homo sapiens
gactgctcatgattcaaagcgactacatgtgagaccctgacatcctaagctcagtggcttttggctccagggccactgccagaccctgctctcgtatgtggatttctttctctagaaatcaaagtaggagcccccaagctggtctcctgcttggggcgtggctcccgtcccagcacttcctggagtaagttaagatgttcctgctttggccctcagggaattggacactccaggtgttggcccttccttctggtgttggactttccgggtgccaggcaggccctgcattccatctgttcagcaactctccaaggcaagtccattcctctgccccaaggaagatctgccaccaagcaagcttggcaaggaaatacaacatgtttacaaaactacaaaccatttttcactagcttgccagtcccctaaaggtactgtaagagcaaaagacatgaaattagcattcttgacctgtgaccccacacaaatcatcattccctagaaagagtggctattcacaaagcagaattcagccattccctcctgattgacacaacctggacatgtgcgtttaaagaggcagatttagagctatcctgtgttccatctaagctttaaatgtattcagccttcaaatgagtattcattacaaagaaagcgttcaggacttttgaatactactttcaataataatactttaccttgggggaggggaggagtaatctatttacaatttgcaaagccttttcaagaacctggaccaaaatcaaagcagcaagactcagcacacccctggaacataagtgctcaatgaatattaagatttctttcttgttctaagaaaaaaacaagaattttttttctttctttctctttctttctttctttttttttgtttgtttttggagacagagtcccactctgtcacccaggctggaatgcagtggcacaatcatggctcactgcagcctcgacctccccaggctcaggtgatcctcccacctcagcctcctgagtggctgggactacaggcgtgtaccaccacacccagctaattattttgtatttttttgtagaggcagggtttctccatgttgcccaagctggtcttgaactcctggactcaagc

SEQ ID NO: 1470 - DNA, 993 bp, Homo sapiens
gcactgaatgggcccctgccatcgggctccagaaactacctgggctcggccgacctgttgcctcatattggccaaagagggggaaaccagaaggagggaattctgctgcggcgacttgactttccaggcccggagcagaaaggtaggaggcgacaggttggaatgggagaggggcggtggctctgcccttcagatgtcagggcgtgttggcggtcagggggaagtatggaaggcaccggggcaaaccagccagaagagctgtggagcccaggtggggaaaggaaaggcagccgcaggctctcccctcctccccagtcatgattgcaggatagggtgaggggcggccccctcccgcccacgccccagtgcctgcctccctttctgcagaggcccccagggtgtcccctgaaccctgaggaatggagggtaatgggctgggggcggccccggaaggccctagaggagcaacgatgcccccacccttctcttccccaccagtcggtgggcatagggaggacggttctcttctaggttgagccccatatctgttctcagccctcagccctgggtctctctgcagctcctgcacagcccttggcaaaactgcctcctgccctgtctttggggccagaggactggtctctgcctgctcctgctgtcccttatgttcccctacccctacatgagggcaccccccaagctctgcatttggagacagggaagagtgggagagacgcattcctaccgtcccctcccctagtcttgctcttctgccatgtcagcccatgctccctaaggcccctagctagcaaggccctcccagggccagagtcccatcctccagccccagacggcctctagaagcctactgtgtactgaagtgatctgggaaaaggagacctgcctgagcacacagcagctctcagcctggggtgggcagagcagatggaggaggggcttgcagaggaggccattcccgggggaagcaaggac

SEQ ID NO: 1471 - DNA, 99 bp, Homo sapiens
gtgccctgctccaaccgaactctgggatctgtgtggggcgccagagtccctaggagaagcctctcgctcagtgggtgccagcctagagaacctggaagc

SEQ ID NO: 1472 - DNA, 551 bp, Homo sapiens
gcaaactgaatggtcagtctcacccccactgtgcctcccccaacagccccaagtctgtttccagaggaagggcgagacggacttgaaaacttgcccgaggctttcctcctctcagctgctgaagaaaagggctttttagttcttcaccctgcctgtgaagtctgcttgcaggattggcgccctcccctgggttctggccaggaggcttctcaccccattcaaattgttacaaagtccagctaaagaattccttctccctatggagttttacaccctgctcctctggccaatctctcaatggatccctgtggtgtcaggcaagaatgggctgcttggggacccagcgagctctcaggacctttctgctgcttcctctacccctgtatttcacttggctcggctctctaacttgactcagctgcaggtaaagttggaaacttctcctggaaacagaccttcagcttttcctgtgggagtgtgtattcaggagaggagggtttccctttcctacttccacagttgaggcactcacagtatttggggtgtctccc

SEQ ID NO: 1473 - DNA, 390 bp, Homo sapiens
gccaacgtgtaacgtatctgctgacccaattttacagatgttctcttcaaaacggactcggctttgtgaatatttttctctatcaagctgtggtgatagaaatgtcaaaaagcaggttggggggggcttgaaatagaatgagacactgttctgctcagaattgattcttattctatcaattggttggactggaatgaatagtgggaaaggtaaaaccactggaattaggaccccctacccctgcccagtgcctcttaccgccaacctagcaacagcctcgcttcatttcctagaaagggcggcaccagcgatccattattgaaaacacgcgactcccataaccttgttcattttcatatgtgtagctcagggcaagaggttctctgctac

SEQ ID NO: 1474 - DNA, 84 bp, Homo sapiens
gctctgcccaggcgcctccttgctccagggcttggcgcctggcccgggttgggtcggatcggggaggaccgcccagcgcccacc

SEQ ID NO: 1475 - DNA, 389 bp, Homo sapiens
gtccagagcaggaagacagttgcagggccagaggcctgctcccaggaggggctgtgctgccgccaaggctgaaaaggtgcagaggagcagtcggggcccagagcagggtgggcaggcctggctggcgacagcaggaccctcccagctcacgcaccatggcttgaaactgcagcacagctaggagggtccttggagatcacatggtcccacctctctccccaaacgtacataccaggaaatggagacccagatgggacagggacctgggctccagaggcaaagctgctgccctcgcctcttccaggggtaatgactcaggggaattcagcgctgcggcagacacagccaagcggccagcggagctgctggcatcccagccctgcctggcc

SEQ ID NO: 1476 - DNA, 36 bp, Homo sapiens
ggggcgcccggcgggggcgggtgcgggggcgggggc

SEQ ID NO: 1477 - DNA, 236 bp, Homo sapiens
gcaccgcataccttgcccacagccgagcagctgggaggctatttataaaggcgggtgagatcagcggccggccaaggctataaattcgcaggccgcggccgggccccacaggagcagccgcccggggcaccggagctgcgggctgcgtggccgggatgagcgccagcacgggcggtggtggggacagcggcggcagcggcggcagtagcagcaggtagggctcggctggggcaccc

SEQ ID NO: 1478 - DNA, 420 bp, Homo sapiens
gagggtgaagtgcgaatgctgggacggggtgggaggggtgggccctggcgggtgttcctgaagcaggggggtctggagaagaatccaggggctagtcagcttcctctcactgaccatcggccttagatttctttggagcagatttccttggaaggcagaaaaaggaaagagaaagttagtgtgggccctgcaccactggaggccctgctggtgcagggccggttaggggcccccagtcatttgacaagaggctgaacccagctatttccacccctagtctcagaaggttcccgagaggggcttcctgcttacatttctggagaggacatgggccgcttgttggctggcttggtgccagagctgtctttactggtttctggaaggaacgggagagatgcgtgagcagcattgtgacagaac

SEQ ID NO: 1479 - DNA, 207 bp, Homo sapiens
ggaggagctcggcctcgcccagggggattggctgtcagggccgccgttgccgttactggtcttggtctcagtctcgctgctccactgcgtccccagcacagctggggagccaatggttgccagatggggcctctccccgacctttgacctaacggtttagaggttccaggcctgggagggatcttagaaaccatctgtgccagcccc

SEQ ID NO: 1480 - DNA, 449 bp, Homo sapiens
gctggggatcttggttgggaagcctgaacccagcattgtttcctagccctgtgttcaacaatgccgggagcgaggtgccttcctatccccgtgataaacagttctgggacctgttgctctgccacacaatcctgagaactagcacaagtcaattcgcttgcaggaccaacacacccatgctcctgaaagatgagactcgcagagcccggcccgagactgcacccagccgtccaaggctgaccatgcttcccacccggccctccccacgccggctcggacttcgggcattttctctcctcctttcctccctggtgatctgaggccggctctgtcgggggagtgttcttcctctttgcagtgagtccaataaactcagctttgcctgaacaacaggtttttctggtggtgattttggggagtctacagccaacagctgaaattgggaaaac

SEQ ID NO: 1481 - DNA, 324 bp, Homo sapiens
gagctcaggccctgaatgggtctgggagcctggaaaagcttcataaagacaccagtgagaggcaggcagagaccagcagcagggtctacagccgtggccgtggtcaaggtgggctcttctttgggtccaccgagcctaacaaccgggccctcttacctggggagaggaaggtggaggctgaggatggcaacttccgggggctccaggcctcggcctcggcgggtgcagggatgctgctgggcctcggggcagtggtgcctggggacggaagcggggcgggagggtgccctgggacgccaaggaaggaaaggaaggttgaggccc

SEQ ID NO: 1482 - DNA, 650 bp, Homo sapiens
gccaggagacccagcatacatgtgcttgaagaagttataagactcaggctttattctctaacgaaatggtcattccccctttgatgtgggggtgggggtggggatgccctgcccaccccccaattccggctcccactcagttatcccacataccatacataccatcaaagtatttaagcaatggcatgcaaagcaagctttcgacaggtttcttgcaagagaaaggcagaagagaacaggtaaaagcagaagagcacacaggtaaaagcagaagagcacaacttctacttaagcccaaagaagagggacctgttcacatcttgtcctacccggaatgatgcacacgcacaggggcttgccgggacagcagtagtttcactggaaagggctggtatggaggcaccgaggacaaggtccttccatcgcagcggtgataatgctctacccaagaaaaaaagattgcgtctgccagccacgcaagactggtctgcaaggatgtcaccatagcagagggcagggaaaacaagcaggtgtcctgccacactctttgggactggccagtctaggagtgtgctttaccccacgcactgaaaacactggttactagaaatatcaaacatttcctgtgattctctcctccaagataactc

SEQ ID NO: 1483 - DNA, 436 bp, Homo sapiens
ggctcactgcaacctccgcctcccgggttcaagcgattctcctgcctcagcctccgaagcagctgggattacaggcaccagccagcatgcccagctaatttttgtatttttagtagagacggggtttcaccatgttggccaggctggtctcgatctgctgacctcatgatccgcccgcctcggcctcccaaagtgctggaattacaggcgtgagccactgcgcccagccaatttttagtttttaatttttgtagaggcggtttttcgccatgttgtccaggtctcaaattcctgggctcaagtgatccgcccacctccgcccctcaaagtgctgagatcacaggcgtgagccacggcactccgccgcaattcctgacttgtactgccccagtggtgttacagcctcgaacccagtttccagacctaagtcaccgcc

SEQ ID NO: 1484 - DNA, 574 bp, Homo sapiens
gcagtgtcttgaagagagaatttttaactaggaaagtttgttgcaaagtgtttataggaagcgtaagacaaagtaacggaagatggtgtctgttgtttctagtcttgggtgttgtctgtgttgcagcagccaactgttgctttgtagtttatttccccgaatggaaacggtttagaagtggacgtgcattccccacccttttcccgtccctcgtttgggttgttccttgaggggcaaagtgcctgttgggctttctgtgaacctcacctaacctgtgttttttcactcccctgcagttaccggtattgtaagaacaagccgtacccaaagtctcgcttctgccgaggtgtccctggtaagtagtggaagagcccctgcactggttggctctgcggactccgcgtccgtctgtgacaccccctgcacacttacccaatccttttagatgccaagattcgcatttttgacctggggcggaaaaaggcaaaagtggatgagtttccgctttgtggccacatggtgtcagatgaatatgagcagctgtcctctgaaggtaaggcaggattctttgttc

SEQ ID NO: 1485 - DNA, 392 bp, Homo sapiens
gtcagggacccccatgagggctaccagtaagaaccagagagagcgacggttcctggcttcagccccaaaccctggctgtcaatatcagccttggtgggagccctaggcttccctctccctctcaaaccctccccaggcagaaggcaacttcctcccttcttccgtctccccagggggctcccatacctgctcagaccagcttgtcaccaagtctgcctcatccttaagtggatcgcgataccccagaagagcagctcctgcctgaatagggctaggaggggaaaaaaaagaggaagaggctgtgttcctgagccacccggccaggaagggcctggctgggccggacgccccacccttgccaacaggcaggcccgccccgtctccgcctcgcc

SEQ ID NO: 1486 - DNA, 370 bp, Homo sapiens
gttgtagggagattggcttttacgcagaaggcaacggggatccatggtagggttctcagtagaggaggaatgtgatcggaattacgtcttacactgatcgttctagcagtggtggggagaacagaccatagtgggcaagggtaaaagaagggtggcgtggtaagaggtaattgcagtaatccagctcagagacagtgctttgagcattttattattggaaatttcaaaaatgtacgaaagtagaaaaatgagtatagtaaatctttttggtttgtttgtttttgagagatggagtctcgctctgtcgcccaggctggagtgcagtggcatgatctcagctcactctaacctcctcctcctgggttcaagc

SEQ ID NO: 1487 - DNA, 251 bp, Homo sapiens
ggccggcttagtggagttcaaaagatgtaggtgaactctagactcttcccataaattgatgcgggcgcagcattaccctttgagatctggacattgcgaaaatgcctttaaggctgctgtgctgctgcaccctgtcatttaattgttgtgtgctgtttgatgatgaaacatcttattgccttcaaaaccaaactgtttttacttagggcagatctcctgctgtaaatgccacaaaatttttccggctcagc

SEQ ID NO: 1488 - DNA, 63 bp, Homo sapiens
gtgagcccggggtgagccgaggggcatcccgggccgaggtcactcgaaccgaagttatgaggc

SEQ ID NO: 1489 - DNA, 522 bp, Homo sapiens
gtgtgataaatcccacttggtcatgataaattatctttttaatgttttatagaatttggttttctagtatttggttgaaaaattttgcatcaatattcattagtgatattggcctatagttttcttttgtgatgttgtaacgccaaagattcttgccttagccacaccaaagaattgatgtggcggcagcccgcggtgagagagagacacggatcagactgagagaaaaaagctgtaggctttattgagcagagtggcagtacaaagcttccacagcgtggaaggggtcctgggccggtagccagtgttagattttttgatcaccctttaaaccctttaaggcgggaaatacgtgcggcgggaagatgttaccagagcgagaaacaaagacaattaacatgtatcagatcttgaggaaaaccggaattgtaacttaaggtttatctactttatgaccttgcagcggcatggcaaaggagacaggatctcacaggattttacaaactgtgtttacaaggaatc

SEQ ID NO: 1490 - DNA, 122 bp, Homo sapiens
gtcctcccatgtgctgggtggagaccaccgtcccgcgaaacaccgggcctgtgcagcgtccaggcctgacacccctccagctgctcgcttcctctgcgcctccgcgccaccgtcgcaggccc

SEQ ID NO: 1491 - DNA, 184 bp, Homo sapiens
gcggtgggacagcctgggcccgctcaagcggggccacagggccaaggtgtgcttgcgccacccgcgtcccaggggagtccgtgttggggctggggcaggggttcccagggcccaggggcggcctgggaaccccaagccagggtagctccacctcgccagcccatgcccctggaggcctctgcgc

SEQ ID NO: 1492 - DNA, 387 bp, Homo sapiens
gagcccggagtttctgcagcaggcgcaacctttcctagaaacggaggccccgggggagctggaggccttcgaagaggccgccttgctggaagcacccttcagcgaggaagaataccggactctgctggaggagctttaggatgcggggttgggacagggtcggatcggggcagggcggtggcctctctttcgcagggaacacctggctggctatggaggtgcgtgtcttctccccgccccctccaccgggctgacctgcctgggattcctgccttctaggtctaggcctggtgagaggctccacacagcggagaactgccattctttcctgggcatcctggggatcccagagccggcccaggtaccagcaggtgggccgcctactgc

SEQ ID NO: 1493 - DNA, 109 bp, Homo sapiens
gcctacgtgcccaggtcccacacatagggcgaccggaatcaggtggtggggccgcacagactccgcgaccactcgccaccatcggcccagcccgctggcgttgctggac

SEQ ID NO: 1494 - DNA, 763 bp, Homo sapiens
gacagagcgagactccgtctcaaaaaaaaaaaaaaaaaaaaaaaaaaaaaaaaaaaaaaaaaagggggcgaaggacatgaacagacacttctcaaaagaagacatttatgcagccaaaaaacacatgaaaaaatgctcatcatcactggcatcagagaaatgcaaatcaaaaccacaatgagataccatctcataccatttagaatggcaatcattaaaaagtcaggaaacaacaggtgctggagaggatgtggagaaataggaacacttttacactgttggtgggacggtaaactagttcaaccactgtggaagtcagtgtggcggttcctcagggatctagaactagaaataccatttgacccagccatcccattactgggtatatacccaaaggactataaatcatgctgctataaagacacatgcacatgtatgtttattgcagcattattcacaatggcaaagacttggaaccaacccaaatgtccaacaatgatagactggattaagaaaatgtggcacatatacaccatggaatactatgcagccataaaaaagatgcgttcatgtcctttgtagggacatggatgaaattggaaatcattattctcagtaaactatcacaggaacaaaaaaccaaacactgcatattctcactcataggtgggaattgaacaatgagaacacctggacacaggaaggggaacatcacactctggggactgttgtggggtggggggaggggggagggatagcattc

SEQ ID NO: 1495 - DNA, 643 bp, Homo sapiens
gagtgttaaaacaagtaaaaaatttcaaagaaagtggagagatcataatttctggtaacaattttagaaactttctaaaagtatacttttaaatagcccatagcttgaagataaaataaggcaaattcatcatcaattctacatatttaaaactgtaggatataattaaatccattcataaggggaaaatgatagtcttttttttttttttttttgagatggggtctcactctgtcaccccggctagagtgcagtagcacaatcttggcttactaccctccacctcctgggctcaagtgagcctcccacctcagcctcctgagtagctgggaccacaggctcacaccactacacctggctaattttttgtgtgtttggtagagataaagtttcaccatgttgtccaggctggggaaatttatagtcttaaatgagaacattagaaaaggaacttgggaaaaacatcaacagaccgggcacagtggctcaagcatgtaatcccagcactttgggaggccgaggcaggtggatcatgaggtcaagtgatcgagacaatcctgcccaacatggtaaaaccccatctctactaaaaatacaaaaattagctgggtgtggtggcacacacctgtagtcccagctactc

SEQ ID NO: 1496 - DNA, 766 bp, Homo sapiens
ccataaagttgaaacttttcaatatcaatagaacaatcagaaaggtgccttttctgggtctgttttagagttgactcaaaaacacaaattctaatcccgcagagaactgcttgtgttgaaatatttacagaaggtcaggggtttctcctcccgcctggagcagagaagtgaagctgtgggccgtggttgagcgaggctggcctctcaagccttgtttattctggaaataactttggaaaatgcctcatatggttccccagaggcctggaggtgggcctgtacagttcacgacaaacgaaaacaaaccattcctctgcaatgtttagcagaatttattaaaaagatcttttttagaacttctagacagagctgatggactagaaatgaacttgcaagtgtgaggaagtcactccacggagtgacacacacgcaaaataaataaataaataaataaataaataaatatatagttcacccaactttgtaactgatttagatggtggaaattttgtaaagtccaccgcagcacagcagtttgaaagagacacttgtttgttttcatcaatccccagaatgaaatcattccccgaggaccgggttagctgcttccttcccggcatggccctgcctctttaaactcattcccgggggggacgagactgttgcctgatgcagcaggggcagccagcagaagcactcctggctgctggatgaagaaacctttacatcccaggatccccctctgagatcaatgaacagatgggtt

SEQ ID NO: 1497 - DNA, 875 bp, Homo sapiens
gaggcaggagcttccagtggggcagtggataccgagaggggaagtagaggagggagagaagttgagtggggaagagggagcgaggtctattaaaaacctctcagtgcataacacaaaatgtcagggtttatagcttcattcttggctttgccgggactgagaaccctgaacagaaatgtcaccgcttgtcatgtttaatcacctgctgtttgttaacaccttccctgcaaggagcctgtctcaatctgtccctgggccccccagggaccaggaaatagaaaacatctccatctccttctctgggctcttggccctgcctaggggctcttcagctccatctgaaggcctcccgaggagccccaaagtgatccttcctatcagggaggccagggaaaggaaccccatatggcccttggaggcgtggtgccatctgtggccctgcgtggtgcgcttggtgtggctgggccggggcctgtcatccccctgcttcttgtgcctggctctccaggcctgcctgtccattctagctattccactcggtcctctaactctgcgggtacgcaaagataaataaaggagagcccgctctgatctctgcagtctggaagtcaccaatctgtctgcttaaacagcaacggtcacataacatctaacaaccaaagccaccatccttccagttacaatcggatcacaccatctggggttctggcttggctctctgagcgtgctttcctgggttgtttaggctaggaattctcagccctactgccccacgttccttcctctgggttaggagtaggtgtgggggaagggcagcacaaatcttccccacctcctaaagcacagtgtggtctacactgggaaagaagctggtt

SEQ ID NO: 1498 - DNA, 1001 bp, Homo sapiens
cttgaacaaaagtgtccttactcattatctaattgaactcccattttacaggtgggaaaattaagacccagagaaggaacttcccagagagctatccagtgagccaagtcagagttaggagcaggagcctcaaattcccaggaaagcagcacggtcctcgagttcccccaaaagccagacggcatctttgacacctgactcccaggggccagtcctggagaggacacctggcctggagccaaccttcctctcctcgctgccaaagctctgctctctgggttctggcactgtctgaaaattcctccgttggtctgctctcggcagagcatagattatcactcttgtgctaattatttttatgattaaaagatgataaattattaaacaaagtctgaaaaatgtgccaagatctgctctgaggctgggcctgagaagttgcccccttggcgtccacgttaattaataaatgagactctccgtggagaggagccacagctggtatatctggcagccaggcaggagctggcggaggccagatgccatgcaggtggggaggaagggactccctgggagtgcccagcctgggatttggtaacagagtcccctccctctctgctcccagcctaggactcagcggagagccccttggtaccatccgaacatctggcctctggaagaggcctaggatttcaagctgagaagctccagctgatactttaatgctgttcccctctccaaatgcagacttgggagcaccccaagtgtctaaaggaaggccggagaccaggattcaaatctctgcgagcccatttctccttgggtaacttttgggtaggtcactcaatgagacgccaagcctcagtttcctcatctgtaaaatgggtagaaatgacatctatttttgcaagggtattgagagtgttaaataggataatgtctatcaagagcactcagctcccagcagatggtcaaaaaatgttagttgggctgacttgaagctt

SEQ ID NO: 1499 - DNA, 390 bp, Homo sapiens
gtgcagtggcgcgatctcgactcactgcaagctccgcctccagggtacacgccattctcctgcctcagcctcccgagtagctgggactacaggcgcccgccaccacgcccggctaatttttttctatttttagtagagacggggtttcaccgtgttagcgaggatggtctcgatctcctgacctcgttatccgccctcctcggcctcccaaagtgctgagattacaggcgtgagccaccgcgtccggcccgttgtttgcttttagttactgattgttaaaagattaagctgctggtaagccgacatcaataatccctccggaaaaatcttttaactaagttaataatagaaaaacattggttgcaattgtagatactagtcatttcgaag

SEQ ID NO: 1500 - DNA, 560 bp, Homo sapiens
acattagaattctggatgccttccagcagctggaacagggcagacctgaggcgggagtccccacgcttaggggaaggggctcaggcactgggagtcggtcagggctcccagaatgtaaaagatacacatgaaagaaacaaacagtgggactcgggccagagcaaaatttggcctagaacggagctaaaaactgtcatagtggtgggaagaagcagattggttcaacagggtaaccaaatgtgaaaaagaaaagcctcacaagaattaaaattgatggttggaactgggcgctccgaggctgtgggccggtgtcctgccctgaagagcttggctgccagcaggtgcagcgctgccctgggataccagctcctgggatgcgctgtagtatcatcaatcaccgctgctgctcgctgggacttggaagcacacagtagtagcagatgtcagcagggggccaccagggccacctgccagtgagcccactgcttagctgagtcatggtcaggtttctctgcagattgttgcctgaaaatatttcaccacctggaacctccctgtcc

SEQ ID NO: 1501 - DNA, 404 bp, Homo sapiens
tccccacgcgggaagccgcggcctgggccgtcccagccacacccagcgcgccttctccagggtcagccagctgcggctctgccgaagcgctcctccgctcctttctcgcgctccagcctccctaccagcccagggggccggaccccaagtgcgagccggtggcgtgggtcagagcgcaggagcgaggcgcccacggacctggtctgcgtttctgagccgcacgccacggctgcgagacccgttccccatcgccgcccccgctcgctgacacacccatcccgcctctcacctgctggtgacacaagtgagaaggctggccccacggtggtgaaaaaaaaaaacaccacacgaaagaaagaaagaaagaaagaaagaaagaaagaaagaaagaaagaaagaaagaa

SEQ ID NO: 1502 - DNA, 731 bp, Homo sapiens
gcgcactaacccgccgctctgtgtgttctcccgcggctgccgacttctcccagctgggacggcggggtcgcagagactggagacctccacggttcggacctactcctgctgaccccccatcctcccgccccgggtctgacgggggagtgcccgtggctcggggtaagtgggccaggcccggggacgcgggcaccttgctgctggccctcggccccacgcacctgcccttggctgccggcctggccctgccgctccagtcccgcttaccagcactgcctggcttgccccttcctgcttcgtctggcctggggcgctttgcgcttggagcacgctgcgttgccgctgtcgcacacatcctacaacctctctcgcagatgccctgcaacctgcctcacagtgcgatgcctgtctctctctctccctcagctcactcccactatctctacggacacatgctctccgccttccgggactagccatggcccccagggctggcttcctccttctgggtttcacaggctcctctggccctgacccctcttgctcgttccccttccttccgcagctcctagtctcgtccgtgactttccggttgccctggatctcagaatatattcgtccaccccctcggcaccccattaccccgagtcccaccgtgtgtccgttgtaagtccggtggatgtggctggggtttcctggtattgtggaggcacccaggttgtccatgcttg

SEQ ID NO: 1503 - DNA, 608 bp, Homo sapiens
ctctgggaggccgaggcgggtggatcacgaggtcaggagctccagaccatcccggctaacagggtgaaagcccgtctctaggaaaaatagaacaaagtagccgggcgtggtggcgggcgcctgtaggcccagctactcgggaggctgaggccggggaatggcgtgaacccgggaggcggagcttgcagtgagccgagatggcgccactgcactccagcctgggcgacagggcgagactccgtctggaagaaaaggaaagaaacagcaaaaagccaaagaaaaagcctacagcacccggtattcccaggcggtctcccatccaagtactaaccaggcccgaccctgcttagcttccgagatcagacgagatcgggcgcgttcagggtggtatggccgtagacgctgaaggaggcgcctggctgccccaagagcccagcccggcccggccgtgcccgccggattgcagccgacaccgccagcccggggccgcggggctcggatcggggacccccgagccgctggcccgcggccttcccccggctcccgcgctcccgagcttccaccacatcgggcccgctcggagcagggagtgctccgaggcgtcaggg

SEQ ID NO: 1504 - DNA, 533 bp, Homo sapiens
ggcctgttttcccggtggctggcgaagcaatgtccttcccccgggtaaagcagcccatgcgttctggagccgacgtcttggctggcgtctgtggcacccgctgcccctgcccgccccttcccccggtttggaagggtgcgacgacggcgcccgatgggtgaattgaatcacctgggcgttccgggagcgggaaggcaccgcgaacggcagggaacccagcggctgcgcctttggggtccggccccctgccctcccaggctggagccgggctcctggcggagcggtgggatgctgctgccgggccggcgtgcagtaggggcggacccccagcaggaggaccccggctgcggctgcggcgggggtgtaggtgggcggtaaaggcggagcagagtcaggggaggttgggaagcatggcgactgtggggggaagggaggcagccgggaagccacaaaagcctacagcaggccgggcgggcgcggtggctcgcgcctgtaatcccagcactctgggaggccgaggcgggtggatcacg

SEQ ID NO: 1505 - DNA, 647 bp, Homo sapiens
gagatcgggcgcgttcagggtggtatggccgtagacgctgaaggaggcgcctggctgccccaagagcccagcccggcccggccgtgcccgccggattgcagccgacaccgccagcccggggccgcggggctcggatcggggacccccgagccgctggcccgcggccttcccccggctcccgcgctcccgagcttccaccacatcgggcccgctcggagcagggagtgctccgaggcgtcagggcccagggcccacgatcctgggacgccctccggtcctccgccctgtcgcggaggcagcgttttggatccctcgccgcacaggggctcctgcgaggcctcctcttgccccacccacccagagccgtcagggctggccgaaggcgaacagccggcccagccgcgcggggcctttctctcacaacgcccccaccacggtcgcttgtcccgaccaagacccggccgggggggcaagagggcgtggggtgtagcgggtcggggggtggccctgttttgccccgggctggcactagaggcggcggcctgatctcgggtgagagggcctgagagaaacccagacacaccccaccgccaccaggagcaaatccactcccccacacacagacacacccgggcgcgctcgcacgc

SEQ ID NO: 1506 - DNA, 544 bp, Homo sapiens
atccctcgccgcacaggggctcctgcgaggccccctcttgccccacccacccagagccgtcagggctggccgaaggcgaacagccggcccagccgcgccgggcctttctctcacaacgcccccaccacggtcgcttgtcccgaccaagacccggccggggggcaagagggcgtggggtgtagcgggtcggggggtggccctgttttgccccgggctggcactagaggcggcggcctgatctcgggtgagagggcctgagagaaacccagacacaccccaccgccaccaggagcaaatccactcccccacacacagacacacccgggcgcgctcgcacgcgcgcgcgcggacacacacacacacagacacacacgcacacacgcacgcgcacacgcacgcacacacacgcggcttgaaggagagcaaggacgagatggatggagagatagaaaccgagggagggagagagacagcgatcgagagagacaggggagggcgagagggaaggagacagacagagaggctgagaaagagagaggcacag

SEQ ID NO: 1507 - DNA, 402 bp, Homo sapiens
gctcctgcctttcttggcacctccctgtgctctgggtgccttgcggcgggccccgagatttgcagagcgcgcccgcccgtttggcgggagccgtggcaccgggcgggcccggaggcctgggtctctggcgagtcctcgggactggagtcgtcgacacgaagcggggggcattgggaatcccgggtgcacagggcctgttttcccggtggctggcgaagcaatgtccttcccccgggtaaagcagcccatgcgttctggagccgacgtcttggctggcgtctgtggcacccgctgcccctgcccgccccttcccccggtttggaagggtgcgacgacggcgcccgatgggtgaattgaatcacctgggcgttccgggagcgggaaggcaccgcgaacggcagg

SEQ ID NO: 1508 - DNA, 744 bp, Homo sapiens
cttgaacccgggaggcggaggttgcggtgagccgagatcgcgccattgcactccagcctgggcgacagagcaagactctgtctcaagaaagacggaaaggaaagaaaaagaagaaaagggtgagctagtgaaaagcttgccagctttggcgcgtgaggcagtgaggggagagggaggggtggatgctagtctggctgggaacagcctgcggagagaccattatcacagtttagtaactacccgtaaggtgtgtcgcgctttcagagtccccacagcactttcacttctactattttactttcatcctcacgagtctgtagagccggagtatcattagcaggtttttattgatgaggaaaaggaagacattcaagacccatctgggagcctccaggagtcctttccctttgttcttctaagtctagccctggtttccaaactcccctgtcccacccccaccccaagccacccttcctaaatgcctgtcaacaaaagcataaaagtagagttcgctcacttcaaagtgggatgtgaagctcagcatcctgctttaaacgatttttttatttttttgacggggcgtggtagctcacgcctgcaatcccaacgcttgggaggcttaggatcgcttgaccccaggagtttgagtccagcccgggcaacatagttggttttttttttttttctcctgtctcaaaaaaaaggcattgcagagattgaaaaccgtttcccaccttctcccct

SEQ ID NO: 1509 - DNA, 420 bp, Homo sapiens
tctgatgttgactttggcctttttctaaaaagtcagaatgtccctgttaaaaagtcctgccaatgaatttggcctttggaaaagtgaccctgtctggattaccaggaagacaaaatgatgagtcatcttgaattttaacggataagagatgcgatgtatttgtgggggttccccaccccccacgctggtcttgcttaagctctcggcaggacttcaggctctgagcagtgctggagaagaaacaacccactgacctgtttattcgccccggcccctgctttcccacaggcaaggaaatcagagcagcgtggttcacttttgcctctgactgggtttcagttcctgacagctccacgctcttggagttgcggctgacttgccggagggacgactgcatttggtttgcctcttgctcaggcc

SEQ ID NO: 1510 - DNA, 542 bp, Homo sapiens
ttccctaacaatgagacatgtccataaagaagggcttcattatttttgattctcgtcaaatatttcaaggcattccgagagcccccatcttcagggttaaccacatgtagtatgctcaatacagccggtgtctaatacacagccaaacagtcgtctttccattaaaatgtgatttttgcttctgcttttccatctagcacatctgttcttctagcggttcttgtgtcgttagccgcctttccatcccaccttggcgctattcttttaattcaattgtgcgcaaattgcatcaggctgtcagggcttcgctttatgaatttccctttgaggacttgcacattcctctcggcacagaggtcggagccggtgggtgcccggctgccgccgccccgcgatcaatggcacctgaagcttccccgggcgaggccgtggctgcctggcttggtcccggagtccacggccacagagactggtgccttgaagacgtggtttttataaccatagaacgttgcatgccttattttaatggaaaaggtatctaa

SEQ ID NO: 1511 - DNA, 346 bp, Homo sapiens
tcctgaacacctaacagtgatgctgcaggctttctggacgggacgggacctcagacacaataatccattccgccgtcgccacgcagtgcctttcgaccattcagtttcagcgctgggaggaaggagaggcgtgcgctcttgctgaaggtcgcgcggggctcaccgaccggttgccaggaagtctacctcctccacgtggcaatcgccgctgctgctcggctccctgccacggggctgccccgactgtgcctccgcaggtctctctggttctgcccgcctttgtcccctcgcaaggcattatccctccccgcttcaatcagggtccggcggatcgtcttcacgcctg

SEQ ID NO: 1512 - DNA, 411 bp, Homo sapiens
gcagcgccctcgggagccatgacccctgacccatcgaggccgcccccgggccgggtcgaggccgccgcctcaacagagcgcgccagggagcagcgccctcgggagccatgacccctgacccatcgaggccgccgccgggccgggtcgaggccgccgcctcaacagagcgcgccagggagcagcgcccgtcgggagccatgacccctgacccatcgaggccgccgccgggccgggtggaggccgccgcctcaacagagcgcgccagggagcagcgcccgtcgggagccatgacccctgacccatcgaggccgccgccgggccgggtcgaggccgccgccgcccggccgggtcgaggccgccgctctcttccagacccactcacctgtcgaggcgacggggtgagacccagca

SEQ ID NO: 1513 - DNA, 812 bp, Homo sapiens
ttgtaaattggagaagcgagatttggaaaagttaaagcaacttgtacaggcacaggttaacaagtggggtgggggcaggacccaggccagacagcatctgaagcccatttacccttcccacgtggacgcatctgtccctctgagttactgtcgtccctggaccctgccagagcagggctcagcacgggctgaggccctctcccctggcaaaggggctgccttaggaagaacccagagccatgtgtggttatccaatcgttgtgaagtctgggagagaggtgagatgggcatctcacgtcggagaaccagctttgctgccccacccaggggccattcccatgggaagggcacagctgcagcgactcacacacccactgtctgatgagtctccacgagaaatggctcaggacctgtggaaggagagggtcccggaggttaggctggggcccccggggaaggctgaaaaagctgcgattcctcagctgcagcagccaagttgaatggcctggtgcccttgtttccctgctgagtgtggttccacagcaccggagcaagctgcgactgtgccgtcaccagcctcagaaagtccctctctggaccaagggctgcttcctactatagacttgggcttccgtctcatccagggtctcatttgggacgcgttgttccttctggcagtgacgccatcacctgcttctagaagggaacctgcccattcatgtgggcgggcagctgctgaagagggaagattcattgtttaggaccatttgcataagtaacgtgtgctgcctgcaggaggaaaaagaggctac

SEQ ID NO: 1514 - DNA, 718 bp, Homo sapiens
tgagtccagtgcagaacagaggaagcagggatgggtcagtgtcagtaccaagtgcagtgcatgctgggagttaaaaagagggtttcggtcagagttcaagcctgaaaaggggccaggggagaaagaactcttttgggaattgggaaagcaacgcctctcagcagggattcaatgatagtgctgcctcacagttggggctgagatttgatactacaattttctgggcttgcaagatgcttatctcttcgaacccagttggagcaggtgcaaagcaaattttctgttgttaggaaggggcaggagggactgaggagcaaaaagaaagctgacaaccgtttcttttacggtaagctgctctcagagggccacgtttaaagattaaacaagcagttattaacatctatttttaataaaaaccattactaaaaagacaagtgaaaattgtccactacaagaagtcagtgtttcatacatcaagtagagagaatattttacttctcattatatttgatacaataaagtatttcaacaggacatactgttttgattttagggagagttttagacgaggaagagatagggtcatgataaactccttaaacattcctggtgaaactgcctagggccctttttggtaagaagcctgcatcagcctccaatcacccaggctggaaacctcaaaaccgtgctcaatgccttcctttttccttgccacctt

SEQ ID NO: 1515 - DNA, 365 bp, Homo sapiens
ccgccgcatggaggccctgctcagccgagtcctcgcgccgcacagcccagccgtggaggtgcacacggccgtgttctgccccggccgccccgagggcaccctggacttccaagcgcgccgccagcaagtgcacagggtctccctgatggatcgggagacgcagaccgatggtgaggggtcggcgcggggaggggggagccccggggcggagaacgctcaaacacgcagccctggaccccgaccctgccgccccgcggggtagaggacaaagccccggagtcacggcctctctcctggcgcctccaggagttttgggtactgttttgggtggtaaggaactagagttcctcccggtgtgctcactg

SEQ ID NO: 1516 - DNA, 450 bp, Homo sapiens
cgtcctgcgcccctgtacctgggctctgtgacggtgaagccggcgtcctcacagtcgcagcagcagcacaggctgagccttccccgtgtgcggcatcacccagctctgtccttcgtgcctcccgggagcccagggagtcggggccaccggacgctggacctgagaacctggacccaggcccggtctgcccgggagttggcaagtgctgagcactgtgtccccttgcacggccactcggggcctccacgcacctaaaggacagctcctgaagcatcctggccctgcactcacggtggcacgcgggcgccgtccccgagcccaggggccaggcccagggcccttccccgaaatctgccatgaaggtgaactcggttacactcaggcccagggctcccgaggctggtggcggctgctccgcatgaggcctgctggctcccaggggccgccctc

SEQ ID NO: 1517 - DNA, 410 bp, Homo sapiens
ccatgtcaggtctgttttcagtcttcgtggtgctattcagctatgttccgtgtgcaccacccagtggcccgtctacggcgtggctgaaggtctattccagtgtccaggtctaacttctttggagtgctggttagggtcagatccacgcatgcgcagctaggggaggagcccaggaacaaacttacggagctgtttcctccaaattcctccctctctgtgatctccctggtcctttcctgatcgctgggctccctttttcgggcctctggccaaaaacttggtgttgtagttaccctgctctgccgtgcacttcctacaactgcacccacagtcgcggccaagcagcgaagatttaagaaagtaagaaagcgtgacggtttgctccactcttttgggctatagctcctcca

SEQ ID NO: 1518 - DNA, 640 bp, Homo sapiens
caggttcaccctcagagggcacgggtgggtgtgggcagctggacccagcagaggggcgagaaaggatgggggaggggctctgttcaagagcagacaggggcaggccccggaagggtcaaggcctggtagggagcaaggggctcggaacacccgagctctgcctctgtgggccttcttaccactcacacggaggcattttttgtcatcaaagccctgctgcctctcccagatggcctgtctggatcaaccctgttccactgggcacctataatcagtctgtggccttcccttcagcttggcagttcagccgctgcgcttcgtgagggagtgaggggtggatactaggggtgggcagcaggggaagcaggagggctggatgacaggacagcaggaggctggggcaggtgagcagtgtgagggagcaggcacagtgaaggccactgctgccaagtgcacggtgaagcaaacttggcaatggcggggccccacgtctcttgcttctctcatgataggctggccaattattctcccagctctggggaaggcaacaatttaaaataaagtgcaggctgggcatggtggctcacccctgtaaccccagcactttggaagccccaggcgggcagtttgcttgagccca

SEQ ID NO: 1519 - DNA, 467 bp, Homo sapiens
aaaggccttaatgtagaacaaaaatcgctagccagaacgcagggggggccccctgccccgccgcgcacgccgcggagaccccgcgcggctgaggcgtcgccagagccggcctcgaccccgagctgggagccccgcgggccgcgcccgccgccggctccacccacccgggtccgggaggccgaggccatggccgcgacagaggagcggagcctgcacaacttctttgccaatcgggacaagaagaagaaggagcagagcaaccgggcggcgagttccgcgggcgcagcaggcagcgcggcgggagcagtggagctccgcattctagagggcggcggggcgggcgcagggacctggctgggcgaaggcaggaccgcgagtgcggaggctgcgggcccaggggccaccaccaaggctgtgaagaatggaaaggcttggagtaaaaagaggttgattacagaggcctgggg

SEQ ID NO: 1520 - DNA, 316 bp, Homo sapiens
cacgagcgctggctgtgcctgctgggcactgccttcacgcgctcccaatcctgcctcatcagcccaggtcgtcgctttgctgagttgctcaacgctttcacactcggcgggcggcactaaacagacgctttcctggggcaacaaacccagccgggcgcgggcaccgctcaggctcccttggtctagcgccctccagtgttgccggccagcactgctgcagaggccgcgggtcgctcggacgggaatggatggaaatgtggctgaggccactgttgacccggaagtgttttgcctttgtttgttaaccagctatgaa

SEQ ID NO: 1521 - DNA, 397 bp, Homo sapiens
cccacccagagaggccccaccccacgttagctctcaggtctgctcctttccttggagtccctgagttctgaatccagcccccctcccccgtgcttggcaaggggggctccaaggagagggaggaggggtggacaggaggagcacgtgatgccgtcacggtgggggctggacatttgtcacgaccgtagaaggtgccacacagacggggagccctcgtgccgaccgtgggcttcagctaatggcgacgcgtccatatggcccctcagtgcggcagacgcccccaccgcaccagtgcacgaggcactcgcggagcctgtggggcgggaggtgtgcggagctgcgtgctgtgcttcaggcccagtttccctgtgacctaaaactgctctaaacactgaag

SEQ ID NO: 1522 - DNA, 439 bp, Homo sapiens
ccgcgctcgctcctgaagttaggcgtatacaccaccttccaactgggacagaagatatcagtctcgctttctctcagacgcccacgaagttgagactgcattcttctgaagattcactactccctcgtttagggagaagtaccagctagtgcgcccgtctcccaccgcctttcctgcccccactgcgtccttgacccaggtaggcatctgtgtcatatctggggcccgccctggggctccatgtcttacctgcatcacttttgaacccaatgccgatctccatttcccgcacaccccagcactaccgggtaacctctgagagtaggaaaaaaaaaaaaaaaaccctcaaagtgtctgcaggccaaccacatggcagcatgtgtgaatatggacgttggcttagttagagggcttacttttgccatttattattttagct

SEQ ID NO: 1523 - DNA, 459 bp, Homo sapiens
atggcctaataggaacagctccagtatacagctcccagcgtgagcggcgcagaagacgggtgatttctgtatttccatctgaggtaccgggttcatctcactagggagtgccagacagtgggcacaggtcagtgggtgcgcgcaccgtgcgcgagccgaagcagggcgaggcattgcctcactcagcaagcacaaggggtcagggagttccctttcctagtcaaagaaaggggtgatggacagcacctggaaaatcgggtcactctcacccgaatatcgcgcttttgggacggccttaaaaaaacggcgcaccacgagattatatccccgcacctggctcggagggtcctacgcccacggagtcttgctgattgctagcacagcagtctgagatcaaactgcaaggcagcagcgaggctcggggaggggcgcccgccattgcccaggcttgcttaggta

SEQ ID NO: 1524 - DNA, 864 bp, Homo sapiens
caggaaggcatgttaagaaaaagcgtgtgagataagatggatttttttttggaaaatgctgtttgcagctctcatctgagtaaggcttggatagctctgttctcagagtttatttctgctgcagtatgataaaggtggagaacgacctgcccgcagttttacgttgcataatggctggatggggtcctttagctgctgaattgctctcttatatcacagctgatcagaaatctggtggttttctctggggaagagtctcagcccagccgcctctgaaatgatgagaggggaacagattctggaattcccgagttccttatttattgctgagaccaaaaggtctgtgtgtggatgcatctctgtgtgtttgtgcttacttacgagtgtgtgctgaggtgggggcacttgggagaagaaaatctcggagcaaaaggacttttccaaagaagaacatcatctaccttgtgctcctgtcattttagccacagagagcagaacaaaccataaaaatcaaagctccagtcccccataagctaagacaaatgactacatgcctcaaagtcactccaaccttgaaacacagcttggaaaagtcttcctgtagcatggtaacaagtcatccagactcaagttggttataacccagcgagaacctgccctcacagatacaggaactgggaatgagaaaagggttttgcttcagcctggatcacgagctccttggttctttcctctccctgtcttcctcttggctcactttgcagagattttcagtctatttcagcatctcctcattaaagtaaatagtgctttcccgagagcatatctttgatatttctgcaattgtgccatagccagctaatg

SEQ ID NO: 1525 - DNA, 599 bp, Homo sapiens
tacaaggcaaagtatttggctacatttgccaaacccaagaagcatttgaaaggaagccagcaaaagatgtttcatggagaccggctgggtttgctctgcttggctcataaagagggtctgtaaggaaatccctgcagcctctcctggcacccgtagccccccttacagacacttccttgggaatggggtctgagagcatctggtcatttcctcgcctaccaggtccgaaggccaggaagatgccccgcatgtccatgagctcgttgtcgtagccgtgccatccacgctgccaaccttcccgcctgccggtgctgttcatccaaaacggaagcatctctcgattctgaaaccaagcaaggcagacacatgacactacgtcctgaccgtggcgctgagcgggcatctgctccaagccgccactccaccggggggcgctttcctcctctgcgctccgactgacccagactgacccaacctccgctgcggcacttcctgctccaggccgctcagacctcgggcagcagcctattcgattgctaagcgctgtggttaacaaggtgttttcctacgtggggctgaattgtctcccgtaatcagtt

SEQ ID NO: 1526 - DNA, 599 bp, Homo sapiens
gcaaagtcagctttccttaactctttcccttcccccatatgcccaaatccacctatcaaatacattttcccctctgctgtgttgattacacctgccctcttcttaaacaataacgataacctgataatctccatctattccttctccagtccgttcatttaacatatgtctttgcacccagcaagtgtcatgcactatgcaaagaagtagagatccaataataaagccataaaaggcaataagctttatcttaagctaatcatatttctcccctgccccaagtcccttgaaaaaccttctttttttttcttttcttgttttgagacggagtcttgctctgtcgcccaggctggagtgcagtggtgcgatcttggctcacggcaagctccgcctcccgggttcaggccattctcctgcctcagcctccagagtagctgggattacaggcgcccgccaccacgcccggctaattttttgtatttttagtagagactgggtttcaccgagttagccaggatggtctcgatctcctgacctcgtgatccgcccgcctcggcctcccaaagtgctgggattacaggcgcgagccaccgcgcccg

SEQ ID NO: 1527 - DNA, 329 bp, Homo sapiens
ctaaggcccggcgagaaaatgagcacagcagctgctggcccaggtgctaagctgctcactgcccaggccgctggggccagccggcggctccgagtgcggggtccgcggagcccacgcccaccgggaactcgcgctgctggcctgcaagcatcgcagcgcagcccctattcccgcccgcgcctctccctccacacctcctcccaagctgagggagccagctccggccttggccagcagagaaaggggctcccacagtgcagcggaaggctgaagggctcctcaagtgccaccaaatgggagcccaggcggaggaggcgctgagagcagag

SEQ ID NO: 1528 - DNA, 379 bp, Homo sapiens
aggtgcccccaccaaaatttaagtgcggcgcaacatgcaccacaggtaggggcactaccagggcaaaaagacttggtgaatgcgagggccgggcctgatcaaaggtgcgtatggtggtaccagagcaaggcggaacagctgctcagtggtccgcaaccgggtcaagggacaagaagacgattctggattgtaggccgcccgagagcgcccccaggagcccatcactgcgaacacccactgcctctgggcttgcattctctgcctccccagagacgcaggcattttctcccctgaaaaagacccctccccataccagcctagactttcccaagggaactgaggccacttcaatctaaagccctaagtataggcaagttgt

SEQ ID NO: 1529 - DNA, 1301 bp, Homo sapiens
taggtacaggccgccagggaggaagaaacttggaactttcaaagacgtaaagaaaaattcggagcgagtctcactcgctgtggtccaacaggcaagtcctggcgggtggcaatatatgtgaaaaaaacagtcatacagataaaacagtagacggcagctattgctgttaaacttccgtcctacttgggacgaaatccataacgcactccgcggtccgaagttgtggggtctcggagcttccaggtgtgtctcgtgaactgcacaagcatttttttgtccccatgcgtcctacctggcagtacaggctggtcacgcacgccctgtaagaccagtggccagcctccatactttctgtcacaccttcaaagtgacaccaacttatgttatcagcctattaatttagcaaagttaaaagggataaaaaataacaaagccttcagagtgacagattataccgaatttattgcataaaagggtcagtaagcacccgcgggtctcgaaccccagcacagagatggacagatagaaagtccggcatgaggaggtaaccgcttgagctaactccgacccgggtaggagtgtgcgactgaaacttctaaaccatagaagagtgacgatgtggagagggacgggctgcatgtgctccccgcccccgagaggcctgcgtcatgcggtctcgcccgctctgcgccaggcgtcctgctaacgtgtcctggagggactctcagttcctcccgcccgcatcctgcgcgggaaccgtggaagggggcaaaatccacccactggaggggaggcaggagggtgcgggggggcgtgtgggccgtctacctaggtccagcagccaggctgctgaggagtacccccgccaaaggcttttcggggttctctccagcagacgggggcagcctaaggcctccataaaatctccccgaagcagcctatgaacttgccaaaggcaggggttctgtggtttcatttcttgccaggtcctgggctggaccctggagacggagttcatcatcagcaaatcctctttgggtggggagttgaatgaattaatgagtgattagcagggcactagggcccaggagtaagcccagaattgagatcacaggctgaagatttaaaagcttcatagctcaagagaaacgctctgttaaggctgaaggagaataaatcattcctctttttccccaacccatccccttgtctacactacttttcttttgaaagattcaggagctggatggagaaaattgctaacaaagaaaatgggaccttcagaatattaataatgtccc

SEQ ID NO: 1530 - DNA, 908 bp, Homo sapiens
tgagggcatctgcaccaccccatgtaatcctcaaaggaccccaagagatagatactattgtaatctccactttagagatgagtaaactgaggctctgaggagtgacaccacattcccaaggctcctctggtgccaggactttaagggaagccgcctgaatccagctcgttggttttctccagtgaggcacctcaaaccttcttgttactaaagccaaggtctttatgtgactgccgaagggttgaatattaccatccccaaacaacaccacgtataaaccagaaagtcctgggtgggtttttgtttgttttgttttgttttgttttttgagatggagtctcactctcacccaggctggagcgcagtggcacaatctcggctcactgcaacctccacttcccaggttcaagcaattcttctgcctcagcctcccaaatagctgggattacaggcacctgctaccacgcctggctaatttttgtatttgtgatagaaacggggtttcaccatattggccaggctggtctcaaactcagacctcaaatgatctcctggtctcagcctccgaaaatgctggggttacaggcatgagccactgcacccagccttgttttttgtttttgtttttagcattgtgattgctgctgctaccattagaatcccttgttatttctcttttgttcctcctgaagatggttggaagctaatagctcttgtgctttatctaagggattcaggaaggctctactgcccacccgcacacctctgactcccagctcaggcagaagaacaggctctggtgaacccctgtggcggtgaggcgccctggtgtagcccacagctgctggggctgaggactttcagccctagggaaggaagatgacaggcacattaatgcattctgcctc

SEQ ID NO: 1531 - DNA, 844 bp, Homo sapiens
gggccagctggtaaaagtgtgtgttaatttaaaataacctgtttgttaattgctttcaacccaagtcattttgttcctgcactttgaaccctaaaggtagtttggaataaatgcggctgggaatgagaagtaattaatgcaagcaggcagccgtggctgcaagagccggggatggagtggggacggcctgaaactggtgtttgtgctctgaggaactgatcccgctggtttgttgttagatttttttttccccctttccttctgccgtctagttgcaggctaccactggaagcttctgccaaagcgggctatcccatcagccctctggcacactgtgttgatcagtagataaaaccttcccggcagtcacagccgccgctgccactgacgaggccacagcagcgagcaagcggctctgcggaattcactaactgcctctccacctgccgtcacctccttgggtccctcaaggttctccttgtggctgatagtcatggtgattgcttgacctcgggccttgcagctggctggcttccaggaagctcctctgatgacaaggtgtgctgaagtctgtgttcacgggcacggcattcaggcgcagagcgtgggatgcgggagaaaaacctgctgccgttgctaatggccccagtgttcttccctcgcaggcagaaattatgcaggcttctgtctcgcggcttctccctttacccagcgccttgtatgtactgggagaccagactgtgaccacctccagggtgacaggaagcagcaaaaaataaaaacaaaaaatgacagaaagacatgcattgtattttccagcctgttgaagcttcctttactgcat

SEQ ID NO: 1532 - DNA, 368 bp, Homo sapiens
tatccccttcttttttttttttggaacactcacacgcaatcacccggctgaaagatggttagaaaaagaaattatgaagagcctggaaaatccacaaaccagacagtcagcccctgaggcgtggagacgccttcccttcctgggtttctggcgcgggcgcagacccttccccagcctggagggcgctgccggtgtcagaagcggaggtttcggaggcggctgcagcctcggaatagccggtcacagccactgcgctgctgtcggtgaaaggcagcccgggacctgaggccaaacgcaagctcaggccgcagctaccaagggaacctgcctaagcgggcggcacagaagggagcgccggggacgctctg

SEQ ID NO: 1533 - DNA, 790 bp, Homo sapiens
ttgggcaagggacctaacgtctctgaacccaccctccttgtgcaaaacgggggcacgaatgccccaaagagtgcttaaaaggtgcaccaggattaataagtacatggagacagcacccgtcaatggaaagggcagcaaggagggccacttacggccacaggggttgggggtgggggtcgggctgcccggcccagccccagccaccccccacacaaggccacgcctcgccaccctccacccacgcaaggccacgcctcaccacccccaacgcaaggccacgcctcgccacgccacagtgctgagtgcacatgaggcggcgtccctgtgctcggcccacgcctgctcctgggccggatgccctggcccccacaaccaactacagaacgcttcgcctcctgtctgtccctcgcttctctttcctgggcctgctgcccctaaacgaggtttttttttttgacaactgactgttttcaagtatgattcactcaggcagattttaattggtgacatcagcacagcatgctaatgctacatatgacttaagcacacgttacctcatttgatcttcagaaccgccaggcaggcacagggctgagggaagaggactcagcagctgcgagctgttgtggctgccctgtcgctcagaccacggaggggcagagccccggctggtgctgcaaacagaggagccgcccaggctgcggccctacagtcccggggtcagcgcccagcccggggaggcagtgccatggacagcctcactggtgagaccactggaagtggctctcca

SEQ ID NO: 1534 - DNA, 356 bp, Homo sapiens
ttccaggggacggtggggtccgaggaggcagagctgcggggaggggcagtgagatgaggggccagccgctgctcgggacccaccactacctgtggcgtcccccagcccaacttggcagcacccgacaacccgcggagacgtctggaggagccgcccccaggaccccagtgcagtgccggctctgcagcaagtgggtgccggccacgctggcgctgcgcacagcccgggagccaagacgccgttcctcccacacgtgtctgaggtgtcagtcgccatgggaacagcctggggtccggaagtgcgcgcattgcagtcttgcacctcaaaacactgcgtaaaagaaccccctgggacta

SEQ ID NO: 1535 - DNA, 417 bp, Homo sapiens
tttctttttttaggattttcctcaggacttgagtgctgtaaaaacacaccctaggggatgctttgaggcactaggaagtcagcaatttttttagagcaagaaatgggtaagacccgctctacattttaggaaagatgtgctggtgactgagcggcggagggagaggaggctggagacagagggcaactggtggcagctctagtagtcctggcaggaattggcaaagacctgaatgaaggcagcagcggtgggcaaggggcagagacgcacaggaggaagctatttcaggatacatctataggacttggtgacagatttggtgtggggaggagagggaggcgtggagtgtggctgctgggttcctggctggggttaggtggtgtatggagatgcaaaggatccagaatggattgggtg

SEQ ID NO: 1536 - DNA, 735 bp, Homo sapiens
agtctgtgtttgtcttagtaatggctctcatgtgtagataaatgtgctgggcaaggtaaggctgtgagtttaaggattagtggtttgaactgatttttcagtcatcctttgcctagttctccctgtgagacagtgaacacttgcttttcatcgtttggtttccagcaaggcaggcattggtagctcataactagggtgactgaataattgattgtccagcccagcacaggtgagagtaaaaggggctgttcactggaggggttacccatgacatcgggtttaaactgagacagtcccaggcaaactgggatgtatggccactgtcctcaccacttaagtcttgcctcctctttgtagcctttcacttaaccctgtcccgtagatgcagggcttctgaccccgtcagcagtcacaggcactgtctttatcatgctgtctcacactgactccatctgtggccttagaggtccatgccagggtttatatcttcacatggagtctccccagctaaactgtcagcactccaagtgagggagctcaccctttttcatcattctgagattcgagtttcttgcaaatgcctcgtcccacctgtggtgaactcatttaggatctggggggtggggccgggaccagagaggctctatgggtgactctgaagatggccagggcagagcatcatgaccataaagactgccagggccctgagcaaaccaagacctgttcagtgcttgg

SEQ ID NO: 1537 - DNA, 1492 bp, Homo sapiens
agtatttgttttcaattgtttcagtgaggctcagtttgaccacatgtaaccaaaatagagaatttcatggaggatggtcacaggattggcttagaaatgtaatcctgtgagctgtcccattttataaaggataaggttccaatggctgcaccgaatgttcctcctttcaaagaggctgggccgagatgagctcccagcagctagagcatttttagtccatcttggtctctcacctctgcctcctgctcagctgtctgaatgccagacggctgtgcagcccaaagcagcccactccgttttaaacttgctcagtttgcaatcaggtaacccgctactgacaacagaaccctcaaggcctgtttatatgcggttctcaggtttaggtctagggaagtatccaggaagcttagtgttcagggaggaattcattttgcttttgctaatcaaagagacacaaaagcacagctgagtcccgaagctggcacatgggaaatcgaggtaccactgtcccctcaccagagcacgcaacaatcacttggggagcggggaataggtccccaccttccccaagcctggggcacccttcctcccacggccccagctggtggtggtctcaacaccacgctcagtgcagagtcacacgccagagctggaaaggggaggtccagccccaagtaaagcgacagagtaagggcacagtggtggccaagggctgtcccctaaccccagttccgaaagacagtgtggaaggtccgtcagcacggcagcccttgaagcactctgctggtccggccgcggaccctcccctgcgcgcccccacctgttgtgaagctccccaacctccgtcttgcccaaatgctttggaaactgccaaaggacactcagaggccagggagtgtgacaggcaagcacaaatatgcaaaagagatggcaccaacatagcaggcacgcagggccggcgctcgcaggggtcggggatctggagccaggcccccgccgccgtggctgcgccagtggtgccaagacccagcaggcagcaccggcgcatgccaggcaccgagtctgcaaaaggggccctgagccagcggccagacacctcgcagactgcgggaagcaatcgtggcggccgcctccccggggctccacggcggacccgccgcctgccgcggccatccccggcccgctcctgccaggcccccgaccagacacccagaggcacctgctctgcgcagccacgcagcccggctgcatgaagcccggcatggtgccccggcctgccaagccagccacggcgtgggaaaccgccgcccaccaaggcaagggcaggaagaagacagcggcggcctcagctcaatatttttttctcaaaggcatatcatagttttagctttgctgcagccatttcatccataatcacttgctgtggctgggtaaagtgatacacacgtacacacacatgcgcacactggtttagagaaatagaaaacgcaat

SEQ ID NO: 1538 - DNA, 369 bp, Homo sapiens
aaggagccactgttagaggggcaccccatctttgtggccatggcggtggtagagcggctgggaggggctctgcggcgagcaagggagcaggcggtaggggttctgcggcgatgggcgggctaggggcggggcgcgggtgggctctaaaagtcggtgcccactcgctccgcgctgccgcggcaaccagcacaccccggcacctcctctgcggcagctgcgcctcgcaagcgcagtgccgcagcgcacgccggagtggctgtagctgcccggcgcggcgccgccctgcgcgggctgtgggctgcgggctgcgcccccgctgctggccagctctgcacggctgcgggctctgcggcgcccggtgctctgcaa

SEQ ID NO: 1539 - DNA, 319 bp, Homo sapiens
gacagaaacctgtccgctcgctggggctccagctctccctctgcctccctcactcgcccccaacgatcctcagtggtgcccccttcttgtgcaccctaccctgccctccccctcccccaccttctacctggaagacgtcctgcctccctcgcgcgccccacctagcgcgcgcctaaccctccagcgtccttgagctcccatcgggcacgcgcctaaccctccagcacccctaatcctccatcggacacacccctggccctccatcgggcgtgcgcctaaccctccaacgcccctaatcctccatcgggcacgcctctga

SEQ ID NO: 1540 - DNA, 350 bp, Homo sapiens
accttgctgggctttctggtggcggcgacgttcgcctggaacctgctggtgctggcgaccatcctccgtgtacgcaccttccaccgcgtgccccacaacctggtggcatccatggccgtctcggatgtcctggtggccgcgctggtcatgccgctgagcctggtgcacgagctgtccgggcgccgctggcagctaggtcggaggctgtgccagctttggatcgcgtgcgacgtgctttgctgcacggccagcatctggaacgtgacggccatagccctggaccgctactggtccatcacgcgccacatggaatacacgctccgcacccgcaagtgcgtctccaacgtcat

SEQ ID NO: 1541 - DNA, 418 bp, Homo sapiens
ctcaagacctcgcgctcaaaagagggcacaggaggagcagctgcagggggcagcgtcgttaggcgggccctgagacagctgggaccgcgcgctcggctctagggagctcggccagtccacaggcgtctcagcagcagctgccacctgcatgcggtgccggcgagtgctcggctcagggcggtttctggccacacgcagtttctggccacgcgcaaggcggttgccttttgaggtcccatgggcgctggggcccaactgctctgctccgtatattatttattctccgagaggttggagacgtccttgtccgagaagttggagggtccctgtctgaggtctgggccagactgccttgctttctggtgctgggccggatgggggccgggtgggggctgggctgggggaagggcgagggcga

SEQ ID NO: 1542 - DNA, 361 bp, Homo sapiens
cctgccctgcggggaggcagctaaggcccgagaaatcgagcgcagcgacggtgagccggcactgctggggcacccagtacaccctccgcagccgctggcccaggtgctaagcccctcattgcccgaggccggcagggcctgccggctgctccgagtgcggggcccgccaagcctacgcccacccggaactccagctggcccacaagcgccgcgcgcagcccgggttcccgctcgcgcctctccctacacacttccccgcaagctgaaggagccggctccggccttggccagcccagaaaggggcttccacagtgcagcggcgggctgaagggctccttaagtgccgccaaagtgggagccc

SEQ ID NO: 1543 - DNA, 362 bp, Homo sapiens
ctccgcaggcttccgcaggggaggacactcagctaggtcttcaagcgcggcttcagcagcaccaggcgatccgcaggctaaaaacgccccccagggttctccgctgccatccgcagggcaggaacacccggctaggtctctgtacagttcccgcagcaccaccttccacagtataatgacgcccgcccccgcagtataatgacgcccgcccgggttctccgcagccgtccactgggtggggacacccagttaggtctcagtgcatggcttcagcatccccgcgatgcacaaagtaacgacgcctcctccctcctctcatcctctgcagccgtccgcagaggacgacaccagctaggtctcag

SEQ ID NO: 1544 - DNA, 463 bp, Homo sapiens
cgcctctccgccgcgccgccgccgcccgcctctccgccgcgccgccgccgccgcccgcctctccgccgcgccgccgccgcccgcctctccgccgcgccgccgccgcccgcctctccgccgcgccgccgccgaccgcctctccgccgctgtccgcttctccgccacgccggcaccggcgctgtgtgcctttgcaagggcggagctgcgttctcctcggcacagacccggagagcattgcgagggcggagctgcgttctgctctgcatagaccttggggcactgcctcgctttgggacaactcggggccgcatcgacggtgaataaaatccttcctgtttgcagccatgtttgtggttggtggcagcgatggacactgcagccagccagagtgtagaaaggcattggggtaagtgcgccatccaggctgcactgctggtggcctgggacggtttgggagccctat

SEQ ID NO: 1545 - DNA, 488 bp, Homo sapiens
ttggatctgaacaggaggacggagaacacagcaggcgtcctgaagctccccctccctcagtggaagtcggctcaagcaggtcctgaggtgaggactcctcggggtttggccctgggacaggagaagacacccacggccccctctcccacgccgccccaaactggaccccggatctagccgccgccgcggggctagcaggagcctcgctgctgccacgctcagatgtggcagtatttaaaggggacccagcctgactgccaggagcggagcgcgagtcggctcagccaatgcacatgcgcgaggcgggagcggcttctccagtcacagtggttcccacggttgtcttagaaaccagtcaccgaggcttggcgaagaaggagccctccgtggcagtacttgggtttcggggctctgaggctccggcctaacctcttcttggggtcaacgggaatgtccccagatgccaggagtcgcaaaaggccaactac

SEQ ID NO: 1546 - DNA, 477 bp, Homo sapiens
agcgcctggtggctgctggcgtcgccatgcgtgagcacctgctggcaggtggggcacacacggcagtccaggcccgcctgctgggtggtggcctgccacgcactcttcttgttgttcttggacttggtgctgagagtcttctcgcggttgccgaagtccgtgtgtgcagacaggatctcctgctgcttggccgtgtcgggcagcaggaccagcagctcattaaagaccttctggaaattctcccccagcagaccccggcaactcttgtaatactgggctgcggagatcaggccctgtctgaactcccctgagtggctcttgaactcgctgaagcgggcctcgtcgctctgcaggaagtccctgatggactggatgagctgaagtttcctctcccagaagttctcggggactaggtaggcccgtggggcaggcggcggcctgggtgcttttgtggtggtggtggtggtggtggtggtg

SEQ ID NO: 1547 - DNA, 400 bp, Homo sapiens
tctgcaccctatgtgcttcatgcctttgatggttttgagagctgaatgtaagcggctgccttaaaaaacccagagttaataattctccaaggcagaagccaggatttgcaccctggggaggcctgacttcagattggatgattccacagagcgtgccgggaagcctgtgtgacatctggtccctggcagggtttccgggagatgtaggcgactgctgcttcctcctttcccatcctggagaaatgttacgattccaatgacctctgtagctgctgagaagatagcagactgtgctctggggtcttccaacctcagagcacacactggacaggatattggaatgccagggttgttagggccagtcccgccccacctgggacctggtaacttggtcacacca

SEQ ID NO: 1548 - DNA, 338 bp, Homo sapiens
atactgaatgggcaaaaactggaagcattcactttgaaaaccagcacagagggagagagttgtgctgctgcctccgagagctccaccttcgtggctctggatccggggccccggcctgtggcggcgagcggcggccgctggagacgagcggcggcggcaggcggccagcccgggtctacctcgctccgtgcagggccgggagagggatccgccatattggagctggggccgaaggtgccttggagccgcggcgcgaggcgggtggaggtggcggccctggcctggatcggggaggagtcggctctgccctggcccgcaaggctggggagctaatgagc

SEQ ID NO: 1549 - DNA, 364 bp, Homo sapiens
gactcgaagccacagcaagagctggacaaacagcaggacgaacggtaaactccagccttgcctgtagcttttggctctaacctttagaatacattatgagcaccggccgggcgcggtcgctcacgcctgtaatcccagcactttgggaggccgagacgggcggatcacgaggtcaggagatcgagaccatcttggctaacacggtgaaaccccgtctctactaaaaatacaaaaaattagccgggtgcggtggcgggctcctgtagtcccagctgctcgagaggctgaggcaggagaatggcgtgaacccgggaggcggagcttgcagtgagccgagatcgcaccactgcactccagcctgggg

SEQ ID NO: 1550 - DNA, 694 bp, Homo sapiens
ctagtccaggccctgcggtacagagcagaaaacggggcctcatcagaagcagggagcggcttgttcttgccctcacagaccgttagagcaaaagacaggagtccagaatcctggggtggccccatctgccctgagaccttggcattcaaggcgcccaggggtccagccgcctatatcttactacgcgtggccaccctttcctgcggatgccccctgcccgccgcccactttcccacctttgcccgagctgtgccctcagccaggaccaccgtccccctggtccgccccgtcacaatcctgctctgagaaggccatggtcagtacagcatgtcagctgccagtgcgaatcccggtttcaccacttactggctggggggcctcgagcaagccatgtgacctctctgagcctcagtttcctcatctgtgaaatgggaacaataagagtcggtaactcaaggggttgttggaaggattcaagcagatgtggcaagggacacgcggggcttgaaagtgctcccacattggccgggcgcggtggctcacgtctgtaatcccagccctttgggaggccgaggtgggcagatcactaggtgaagagatccagaccagcctggccaatatggtgaaaccccgtctctactaaaaatacaaaaattagctgggcgtggtggcgtgcgcctgttgtcccagctac

SEQ ID NO: 1551 - DNA, 385 bp, Homo sapiens
agaagctagtctgctgtgggttcatgtggccccgtggcttggtgtgaggttttgcctctgactgctggacagtgagtcagtgagcccaggcctgaggccgctcaccctccagccctagcttggcctcagggccagccaccttctcctccagcgtctagagtttgcctcgaggcctccgggtagaaggtgtgcatgtctccaccagtgtcatgtggcacctgcagatggcttctcgctggcacctgtcatgctctgcagacgtgcctggaaaagaagcttatgttgccttaaggtcatctttctcctttgagggagagtacagaagtcgtggcgacacccacagccaagccaggatcgttatctacgcgtgagcatgcagagcggg

SEQ ID NO: 1552 - DNA, 406 bp, Homo sapiens
ttttaaaaaaattttttaaattgtgccagggccagtgctaagaacaaaggtggaagcaggaccgtcctcagggagccgcttccgaacactcctggcagagttcaacattcactgtcagtgatcagattaaaaattacttcaccatcataaccggactttcaccctccccagccctcctcctttgcaaatacaatctggttcctggactcgcctcactgcctacaaagaacaagaacaacggtctccacgtcccccgtggggtgcaacgtggctctgcctcacagctcagctctcaaaccgcacatgaaagcacctgcactcatgtgggccccgactggttcaatccctctcccctctccacagtaactggttcaaatgatccaggcttgagccgatcagaatttgg

SEQ ID NO: 1553 - DNA, 452 bp, Homo sapiens
tccagatcattagaagggctttcttggcagtgctaagttacagccatcagcagagcaagccctggctaaggctaatgtcacatggtaagatgatttattctttcccctaagtcagccttgaaaatacatttttcaaattgcctgtccacagcgtagttttactgtgacaaggcactcagttccttaacattcacctggcacaacgctctcaacagcaaagccaagtggcagaaagtgctgggccacattgccagggtacatgccagtcggttcaccagagagtttgcaaaccccagctcccgggctctgtctgctgcactgatattctattaaatcccatagaccagaaaaagcttcaatgcttagatgcaagaaagagttgaagtgttcgtggccactaagcccaggactcagccatgacaatgaacggtatcaatgaccagggaaggata

SEQ ID NO: 1554 - DNA, 331 bp, Homo sapiens
gctttctttaggcgcctcctctgcctgggctcctactttggcggcacttgaagagcccttcagcccaccgctgcactgtgggagcccctttctcgggtggccaaggccagagcccactccctcagcttgcagggaggtgtggagggagaggcgcgagcgggaactggggctgcgtgcggcgcttgcgggccagctggagttccgggtgggcgtgggcttggcgggccccaaactcggagcagccggccggccctgctggcccggggcaatgagggacttagcacccgggccagcggctgcggagggtgtactgggtcccccagcagtgcca

SEQ ID NO: 1555 - DNA, 873 bp, Homo sapiens
cggtgtcctcagctggatgcctgccctctggcccttgcacccttcctctgctgctcactcagaggacatggggagcgggccgagccctgagccaaggcggcccagcgattacatcagcaggtgcaaacaagcaggcgggagcagggacgggcgtccctcggggctggagacggcactccatccgccccacacgagtctgtttcattccctccttctagcttgcatcagccttttgcagctctgtgtcatcacagagtgggccaaggcagcagctgggaggctggggcaggggtggaggtgaggtgtggggctcgccgggaccctggcagcctggaaggtccactcactgttttttcctgagaatggagtacaatattccccccttactcgaggtctccctgtccacagtttcagttacccatggccaactgtgacaccaaaatattaaacagaacattccagaaatcagcagttcacacattttaaattgtgtgtgattctgagtagcatgatggaatctcccactgtctcactccatcctgcccaggatgtgaaccatccctttgtccagggtgtccacactgtatacaccatccgtcacttagtcactcagtggctgtctccattatcagatcgaaaaaaaaatcatctgtctagagcttggtactattcaagttttcaggcatccacggggggtcttggaacgtatcccccacagatacggggactcctgtaatagaaattagctagtgcatagggctgcccagctggcaaaatatttttgtacttctgactttggtgtttccaacagccctgtcagtcaaagcaagtaaaagtggtcccatttctcagaaaggaaaattgaggcccaga

SEQ ID NO: 1556 - DNA, 394 bp, Homo sapiens
tcgcggaagtccagcggcgtcacctcgctccacatcctgaaggccagcgccacaatgcgccgctggtcggccacggacagttggctgctcagggcctcgcccagcagccgccagctcagcgtcctcttggagaaggcctgggcagctccgccgtcggggtagccccggggctgccaaccccgccgggacaaggacagcggcgcccgcggggagcgcctggagcgggctctggggggcgggcccgggggcgaaggcggggcggaggggggcggtgggcgcatgtccgggaccccgcagcgcggccggttcatggccgctagggtggccgcgtccagctccccgctggccggcagcgcgttcgcccgctggaacctgcgcaccgcctcggccaggg

SEQ ID NO: 1557 - DNA, 476 bp, Homo sapiens
cggtgtggaggaggggccgtgcccccgggccgccgctctgacccgcgcccctgccccgcgcccccgcccgcagagcgtggagaacgcggtgtgcgtcctgcggaacctgtcctaccgcctctacgacgagatgccgccgtccgcgctgcagcggctggagggtcgcggccgcagggacctggcgggggcgccgccgggagaggtcgtgggctgcttcacgccgcagagccggcggctgcgcgaggtgggcaccagcctgagcggggcgtggggtgggtgctgcgaccccggccccgctgaccccggccccgctcacccccgccccgctcacccccgccccgctcaccccgccccgctcaccccggaccccgctcacccccgccccgctcacccccgaccccgctcacacccgccccgctcacccccgccccgctcacccccgccccgctcaccccggaccccgctcacccccgccc

SEQ ID NO: 1558 - DNA, 387 bp, Homo sapiens
ttgccgggctgtgcttacggctcgcgggcgcactctactgacaagcggtgggcggcctcacagactctcccaggcccgcgtggggcaccacggttgggagtggagtggagactggcgagtttcgactcccccagccaccccgctgtgggtccgtcggtcaccaccttggcctttggtgagggttgttggggccctgcagtccctggggttcacctcaagtctcgagtgtcaaagccgtgaaggggagcaccagggccaagggacccagagttcacgggtccaatcacccagcaggccctctgggatgtggaagggctggccgcgccttcggcaaaccctctgttcccatggccccaccggaaagggctgagtgcttgcctgctgagc

SEQ ID NO: 1559 - DNA, 349 bp, Homo sapiens
gtggctcccatgagtgttctatccctcactacccccgtgaaccttgcggcacctagcttgcgtgacccgggacgtttccgcgggtgaacctcagctggggcgggcttgagctgtgatgtgggagcctgcactgccgccgcgcggccacttccgattccacaactacaaccgattctgcaccatcggggcggtgagaccgaaggggaagcctccagaaatacacatgtgctatgcaagagcccccaggctctgtgcctgccagagaccctgtaggaggggtctcacgcttaggccgagatccctatcatccaaggaactgggacacctcattgtcccccaagcatctcct

SEQ ID NO: 1560 - DNA, 568 bp, Homo sapiens
ctggctggccaaagctggaggatccatgagatagaaccttcctcagtggctcagatcttgccagctggtagcctcttcttttataagatgtggaccccagagagcctctggaaaactcaggcttcttatcagttaaggaatatcctataagcgaaggaaaacccaggagtgagcaccaacagaacatgatgagtaggcgcatgaaaccacccgaacacacccaatggcctttaaggtagtcaggtgacatcttggcctttttcattgccatccactctaccttaggccaaagcaaactctaccctcacaaaaggtcacaggaccacagccagaaccatgagaaagccaggtgcttaccgcaatcagggctgagttcctctggtcccctggggttgaagcgggcggctgctgctctccgtttatcccaccactgccaccattattgctactgttcagcaggtgctgctggtggtgatggtgatagtctggtgggggcggtggggctgctgttgctgctgcttgggaggccgcaggaggggcagcagggggcggtggaggggctgtagtg

SEQ ID NO: 1561 - DNA, 846 bp, Homo sapiens
cggcttgccacccaccagggtcaggtcgtctcaggtccccggggaggtttgactagccaagagccccaggcagaggcaccaggagaggagagcagcattggcagggcctgccctctcccagagcaaacagggacaaaggttggtgtactcacggctgcctctcccatcctgcctgtgcctgcccgccacaccagatactccaggttgtcccagcattgctacattaggcaggaatctgtcatctctgcctgctgggtcactcattaccccagatccaattcccaggcagggaagtttggggcatcagagcagcggagaaggctttggcattcaggagctttaaaacagaaaagctgtcgtgtctgtacctgttcagtagggagccaaacgtgtttattgcatgtgttatgatgctatcgtgaaagtatgcatgaaaggaaataatttgtaagctcgctaccctgcctgtctggaaaagtggggccctctgtgtaaaccccagctctgcaggcattctgagagcttgaacattccttgtgactatttcttatactacatttcactgccaccccagtgtgtttgaatttgtctctgcgccagcaggtcggagtacccattgggattctctgtgagaattcaaacaagttggaggcgctgaggttgccaagtgcaaccaggtctggcacagacttggcgtgagagagagcaggagcaagaaggcttggacatcatgaatcactgaagccctggcccatatagccttcttgtttgggattagtatagaagtgttgtttttccttctttatacctgagaatggccttcagctgctgaaatgatgatattta

SEQ ID NO: 1562 - DNA, 1897 bp, Homo sapiens
tgttttactacagtaacccctttatatacggatctcataacatcatgttgtatatcttaaatatacacaataaaagctattaaataaataataaaattgaaaaacagatgttaaaaatggaaccaggaaggctgcatgattccagaacaatcggagacagtatgtccctttggagaagtgaagaagacgactgggcaggcgccgttgccctatgatgtcatccgcctgaccctgtgagcatttggttcaaaatctctgcccctggaagactgagtggcccggcagccactgaaaagcctcatttccaaaaagcccaggcaggaagggagccgtgtggccgccgtggctcatggcaatgctggagtcactgggcctcgtgcttctgagcccttgaacggctcaggttaaagagatcccgcgactctttatgttctaaaagcagatcactccaaacagcccccttcccctcaggcctgggatgagattcacagatgccctgctctgtttacctatgacaaggccagacacagcccctccaaaatctcagcctttgccttctcagagatgagctgaactgcgtgtccgctggtggaccagaacaaaatgcgcatcagccaatctttctttaagctcctctccttcccctaggtccgcccaggcccgcccccaaagcatgagccccagaaggcccccagcatccccccggggagcagatgcaccccaaggcaggactttctcccatctgctgtccggtccttgccaccgtggccccagcgcctcacaccgcacaccgcccggcacctgctcttcctagctggttttctcctccctttaaagggaaaacccaggctgcctggccctggagactggcagtcacggccagagccctccccacattcccgttgccccttcctgccgccatagggatcagttacaataaaacccctccttctggagtccaggatttcttctgtggcctcatcatggagctatggtcactcaggaggacaatgggttaagaaacgcctctaccacgcttcactcccctctgcaaggtgcggcagcacagaccccgcgcccccaggctgtcagattgctcaaaccctccccaggaaagcgcagcagcactgagaagcgcggcccagacagaaacccgggcacctcgtcccctttgtcccacacgaggcattcttacacgggccaggcacaccggagtcacgttgtgctgctggccccagtggctgaaagtagaggctgataaatttaaatcactgctgagatgacagcccatcgctgtgccaggagaggagccaagtctgccaagatcaggacttgatggtgaagcaaacgctggcacagccgtgctggccccgggccacgcgcacatggccagggcgtttagcactcgggcctccgcaccagcaggagcgaggccgtgtcttccaactccctcgacaggcgtgaggggcacctgccagcgccgtcgggggcctggggcaccagatggctgcagggccggaggaggaaggggtgtggactggaaaaggtgtcgaggcgggaaggggacgctctgctgggaggaagaggccgctacgagcccagaaggcagcggggagagaacagcgcaaggcacaggcggctgtttgcaccaactcatttgccggcgtatacctcgcgctcgctgggaagcatttgcacaggctgcaaagcgcagcgattagagacccgcttccaaataaaatcaccgtggagagactacattttcttttcagctaatcctttcattatctcaccttgttaaagtgaaaatgtcattatagcttttttcaggtcagcgcccagatcctgctgctaaaacctcgtctagttcctgatactttatgaatcagagacccat

SEQ ID NO: 1563 - DNA, 1019 bp, Homo sapiens
aaggcccttgggtcctccccaggtcaggccaagtccatgagccatcgctgagcagcccccagggagggaggggtgtgagcgtgggtgggctcccggcacctggcccagcatccacgcctggtgtgtgggcatctgcctgcagaccctcgtccgagggccccgtctctctggacccctcactgcaggtgaatagccacagtccctcccccaggccctgccctgcgtgttggaaacaccacctcctgggccttccccgtttgctcattcgggatccttgtctgggcactgaggacgatgagctccgcctctgttctcgcgtcagggctcggctcctccgtgtgtggggagacaggctgggatagcatgctgggcgactgtggtgagggcaaagacacagagggcatgagtggggggctgggggggcacctggatgttcagaggccagaaggcaggactacccgcaggtgcccaagggagacccagggccgcccagaagtccagggggagtcctggggcctcggagggatctgagcagggctgcggcctgacccaggatctctctggcctccctggcgtcttcccaggtggcccaggaccgcagtaccagactgagctggactggcattgaccaggccgaggccaccggccatcctcctccggccagaagctgcagtgataggggacatccctagcagttcacaaagctgtggggagaccccgagggggaagggtttccatgctgagccacaggcccggccacggtgcaaagctgtggggggactccgaggaagaagggttttcatgctgagccacagtcccggccatggtgcagggatttggcacgaagcctctcctagggccggtacacgacctagagggctccctggtgtaccctgggacctggcagagtgcagcttctcatccagcaggggtgggtagggccctggactctcctagggcagcactgtttaataggagtgttatgtgagccacatatagagttaagaagaaataagtaa

SEQ ID NO: 1564 - DNA, 381 bp, Homo sapiens
gcatgaagatgatgaagatggtcttctccgtgggcctggagatgaagcagtccaccgtgttggggcagggccagcggtcgcagcggtagagcggcttcagctcgaagccgtacagaaagtactggccggcgatgaagcccacctcgaacagcgtcttgaagatgatgttgaagacgtaggtccgcagcagcgccccggccatgcgcaccctgccgcggtcgtcccgcgacgagggattgtcctgcggtggctccttggggctggggctctctctcttcagctgctcctcctcctccctctctttcttcttctcttccatgcgcacgatgtgcagcacgtggcccaggtagatgagggtgggcgtggacacgaagatgatct

SEQ ID NO: 1565 - DNA, 516 bp, Homo sapiens
gcttatgagattaggaaagaagtctaactggcggacattaggacccaggaggcaggagtcagaagatgtggctgtctcacgctcagtaacctgtgcagggggagcctctggtggggccatggtctcaaccaggatatccgggagactaagacgtctgctgagcactcccggtgtaccttgggaccaccacagaaagcaaaagagttggaactggttccaggccaaccggccaaccaacgctcccaaacccgaagggtcaggggttgtcacagagcccttttccggacagcctgacacctgtgtctttagtccggtggccgtgctaatcgcctttaagtggccaacaggtgcccggtttagcctccgaattctaaggaaggacaggacagaatagcaagtgaaagaggtccgatcatactcaccatgtgacgatctagatgcctttcctggagactcctggctggctcgccaaaatgtaacacgtaaggttcttgcctagccacaccaaagaattgg

SEQ ID NO: 1566 - DNA, 559 bp, Homo sapiens
agtatagaaaaacaagaaacacaatccattgccagaacccaacattaagtatactaacagttgggttttaaaaacattttcattctaatttttaaatctatacaacaggtgtttcatgctaacttgttggggcagcactctctgaggtgggcggcttcacaggtatggtccactccgggtcttagaatttgccacttgttaagagccccgtcagcccgaggtggaggggaagccgggaggaaaatggcagccaaggctgcatcgggcggcgaagagggcagtgtacccagggagcggggcgctggccaggccaggctgggaatggaatctgtccctagcagcgaggctggcactgaccccctcccagtcacagccactgaagcgtctgtgcccgaccgtggggccgacgcccaggagaacgctcctcaggccgtgctgctgcccccgctgcggggagcttgcccgcagcccggacgtggcggggccggagctggaggctgaggggaagctgctggagagggtgagggatccgcagcagccacccctctcaagagtctga

SEQ ID NO: 1567 - DNA, 775 bp, Homo sapiens
tcttgcatcgaaacagttgcggtctgaacaggcaggaaacagttttcttttaattgccgaaatcattcggaagtgcttcatgccctgcttctgtacagcagatgctgtgcattaattggcctgcgtagaagtgacccagggttccttgcagcgggcccaattttaggcagagggtttaaatagcttatttattattttgtataatctggcgtacattgtgtgctcctgcacgtgtcgtatttcatggtctgcagtttctaatgtcatgtgggtttcaaaacctgtgtttctctggtaatgtactagcagcaggtaagctcaaaataccatccatcaggagctaattttttatccagatactccaatgactgatgaacctgtcttttgtatgaatgtttagcacagtggaaagccatatgccactggcaccgtttcctctgcattccttacagttgctagagagtgggcttcctggggggcggggcggctcgatgctgtgaacgtcccctggcctctatttcaacgataacacctttaaaacagccctgggtttgggcaacaaaaagaggatgggctgtcttaaaggagacctgactccctcgtcattttctttatcagaaatacgactgcacactcttaatagggaaccttgttttgttactccccgtctgttccaaacagacctcagcccattagaagggcctcccttgtgtgggagaccacagctgttactgtaaatctcatccactcactgtatcacccccattttgtggct

SEQ ID NO: 1568 - DNA, 393 bp, Homo sapiens
tcagaaagcaaagtgttaccatagtaacaggactatgttaaagatgtctattttgcatagcacataaaaagtaggtttcctgtttactcttcttgtttcccagaagggagggggtgcgggggaggacaggaggagggagccacagctaaatcgtcacctgaagcccccagtgtgacctgctggattctagagaacacttcagcccataaggcaagggaaaacccaacgcagaaataaacgccggaacatcttgtcattgttaaatatatgatgcagtcacatcggcttcctgctctgtggggctcgtacttcctagtctacggttccgtgagatgccttcggaggacttggttatttttgcatttgctctcattattgttctttttggaatga

SEQ ID NO: 1569 - DNA, 350 bp, Homo sapiens
gagtgaccctggcatcccgaggtccagccctctggctccccacccagtggccccccaagccccaccctgggcccccagacgcccgcacaccaacacaagacaggcacctcccaggggtccttgctctgtggtgacagccggccggcccctgcggtgggagcgggagtctggggtcgggaagggtctctgccgggatctcgcgggctccgggcgcctttggcgtctcctcggtgcaagcttctctgcctcggcagctcagtgtctcctctcagcggccgtcccaggaggaactgcagccggattgtagacaggacacagaaacgcttgtctggtgcaggcgccatgctcgc

SEQ ID NO: 1570 - DNA, 106 bp, Homo sapiens
acggtccccgatgaggggtgacagtgggtccctgtgtgttcggtccccgcttaggggtgacggcgtgtccccgtgcttacggtccccgctgaggcgtaacagggcg

SEQ ID NO: 1571 - DNA, 358 bp, Homo sapiens
cgcgagagggcgctggcggcactgcggaattttggggggcggggtggggaggggaggtggcctttgttctcctgatggagggggtcgggcgcgggatctactggaggatcctggattcgtttacccaagagggaacagttttgagaccccccggattcactgcggagtggccgcagaggccggggtcggcctttgcgccgtggcttcgggtgttgtggaggcgcacagaggcacgttagttgatttccagtggtttttggtttcgggggtcttaggaaggtgtggctcatttgagcaggatggagagagaggctgtgacaaggtcagtgaggggccatcgtgcgggggctagaaattg

SEQ ID NO: 1572 - DNA, 371 bp, Homo sapiens
catccgcccccaactgtggtgtcgcgacaggtcctattgcgggtgtctgcggtgggaagggcggtggtgactgggagcatgcggggtaaccgcagtgggcaagggacatgggtggaggtgggtacatcagggtgattgcagttccgtgtggcgagggtacgtggggggaccagtgcatagggattttaggcggaggtaggtatattggagtgattgtggcggggcgaaggtacgtgaagtgatcggtatttagggggtgttgagcgcaggtaggtgtataatagtgaccactgcgtggtggagcagggtacgtggggcgactggggggggaattcgtcgcagtgaccgaggcgaggaggctatggcagtgg

SEQ ID NO: 1573 - DNA, 699 bp, Homo sapiens
caggatgggcaataaccatatagctgccgggtagcgtatttatcacataacacattgtaacagataaccgtgaatgatgctgatggcagaatttggtctcgttcttttaatgtaatccatggcctcggaggaagctgctctggatgaactgcgagattgtcaagcatgaagttcagtagatttcgggttccatctgggtcctggtataagttgagaatatcctgtgataaaggattgcctttcaaacctagagtttgtagctggaagagcccaccaagttcataaggcaaaacccgtaacaagcaattccccgagatttctaattctgcccagtgagattttttcccattggctacctcctctgctgacatgatggtataaattctgcgaggatctggaggatcatatttttcctttggcatccctgttagtctgcattcagcgcgccaggatccgggcggcggcggcggcggtggcgatggggcggctggtgctggtgctgcggcggctggtgctggtgctgccgcggctggtgctggtgctgcggcggcgggggaggcggcggcggcgggggaggcggcggcggcgggggaggcggcggcggcgggggaggcggcggcggcgggggaggcggcggcggcgggggaggcggggctgagggcagcaaagacatcaacattcttctttaaacattctagc

SEQ ID NO: 1574 - DNA, 826 bp, Homo sapiens
gcctcacctctactgtcaatcactctctacttcccctccctccccaccccagatagcattacctaggggcaccgagggggttcgcgggccccactggcccaacctgtggcctttcttaagctgaaaaacctgctgaaggagaaaatgaccacgttacctataagcaggagcatctgggtaggagcccggggaacatcttccttctggctccttccaaaaccccagaacccagtgcacgggcagccttttgaagacaggcgagctggctctacctgtctttctgatttgaaatctaggtcactcactgcctcccctcctcctttagaagatcagcaggatatcttctagggtctcagagtgagagaggggacgacagggaaaagcgtttcaatggaacccacaccctgcctgcggctgtcaggaacacttcattttggaagccagtataatttatgagatgcaaatggatttagcactaaaaaagaaaaaaaaaatcttggaaaaggtacaaagtgcacctcacaccctgtgtcgaggcgtgtttggggctctgttaatcatctcagacaaaagagatttaatctcaggctagctgatcctgagagtgccagcatctctccccaagcccaggaggcttgcccgggaagatgcaggcctggcctctgtgcaggctccggggctccggtgcacggcacttgtgttcagctcttgtctgagtcacgcagtagatgaaattacggaggttcctgcacatgatgaatcagaaagcaggatcaagccaaatatttggacaagccttgcctcgcatagagcaggatgaagactt

SEQ ID NO: 1575 - DNA, 2500 bp, Homo sapiens
gttcccgggggggggggcagcaggatctgcgggtggccgatcagggtccccggctgctgggtgccccctcctgccctgtgggggtgcctgtgccccccgtgccaccggttctcccccagctctcccccaaacagggacaggtgagtggggccgggtgtcggggcctggcacagggctgctggctgccccgggagcgattgccgggtccggctgggacgcgcgtgtgagtgcgtatgcgtttgtgtgtgcgtgtggctgctgtccaggggtgtcttttgctctgtgtacacacaccaggtgggtgccagctatcctccgggtccccaaggggtcagcagctgctgagacagccccttggacaagcccctgacccgggagcccccggtccctgctgggaggcgggatgggttgtggcatcggctggcacagctgtgtggctcccagggctgggtgatcgatggcccggcacagccgcctctgtcgccggagcgcccacacccatttgtcatccacatgggtggggggggcggcgggcagggagaaggggccgcctctgcacccaccacccagtccaggccgggtctgcagcccctcggggagccccaggacctctcctggcccagcccctgcctcccgaccgccaccctgtctcagccacagaccagctggtcagcctctgcctgcccctgcagcccgtgactgccctgcagggccccaagcctttggacgagtggacttctccagccctgttggtcgtccccccaacggcaccaacacagtgttttgggggcagcagacagcagtgccccagccctaccctgctcaacccactggccatgcatgaccacgggtgcgacccccagccaggtctgcgtgtgtcctggggagtcggtgtgtagggcctgtgtgagcatgtgagtgccgtgttggagtggtttggaaagcccccccacacctggatgggtggtgagtgtgttatcacggacaagcagccgtgttcaccgtgatggagtgtgaggtgtgtgcagccagggccccgcacttggtggcagactccgttctgagcttaggtggcacagaggtggcttctccgggcactgggtgagggctctgtgtgagcctgtgggctgtgtacacacacccaaagcccgtgtgcgcaggcgtgctgtgcaccccacacaggcgcgtgctggggcggtggacagcccaggtggcggcccagatggagtgtggcgcgcataccagcgccgtgtggggcgtggggaggagcgggtcttggctgagtgtggccgctgcaggctcggccgctgacctgcccgaagccacccagatggagctgggctgagcaggtggctgagccgtggggccatgctgggacgtccactccccacagcctggcctggccccacatgagactgaccccctaagagacccccagtgcccacctgacgccctgctagagcaggctctgtgccgcctttagacacacacgcatacacacgcactcacacatgcatgcatgcacacatgcacacacaatgcacacacgtgcacatgaacacaagcatgcacagaggcacatgcacacacaggcgcacacacgtgtgcacacacacgcacatgcacgcacacacacgtgcatgcacacgcacacatgcacacacacagacacacacaggcacacacacacacacgcagcatcatcccacacagacccttccgttggtgtctcatctcagtgccttttcctaggctttgaacaggcagattggcaggggccagggttgctggagggaatgagaccaggaggctgacgtccacccgaagtgagctctggtcacgctgattcttttagccactcacatgctgtggggagatgggtgtgggctgaactatcctagaaattggccagcaagtcggcctggcctcaggggtggggatgtgtgtagggtcaaccgataaaataaaggacgcctagttaaaatcgaatttccgataaacaatgaacacctttctagtgtgcctttccaatattgcctaggctacacttaacactcagaaatgacgtgctgctgatcggcgtcagatgcagctcgctgtcctggacttttttttttttttttggtgccctggactttgctgccaccctggaagtgcacgtggggaggagccgaaggatggggctcggggggcacgttgcagggcagaggcggcggggtggggggagcacccaggctccagtccctggagcctggggagccatggatggagaggagtggggagttagtcagaggcaggcttggcactgactgtggccccatctacaggtggccatggtgcccggccctgcctcatagcaggctgccatgtcgcgggaggcgggctcatgccgcgtgggcacaggggcgagggcgcggtctcggaagcccaagaagccacactacatcccgcggccctggggcaaaccctacaactacaaatgcttccagtgccccttcac

SEQ ID NO: 1576 - DNA, 444 bp, Homo sapiens
ttggacgaaaaaggtacctcgactcacctgggcctcgggcgtcgggggcatggacgccatttggcgggtggggaatgccttcttcaagacgccacagggacttcgtgacaaagctgcggggggagagaacagttcttaaagggaccaattccgctgccaagttcctccactacccctagcctccctcgattccctccgaacccccccttaaaaacctacgccgactgctcctcctcttggcccggcctcgaaaggggcccacttaccgctccgcggttaataacaggcctcgcgctccctgacaggagctgcagaaagcgacgcccgaccgagacgcgacgaagaacgccacggccactgcaaaactcccacgctctcatgctcctttacgcaggagctgcgggaaaagccgccggaagcgacccgccctcagccctctccgcc

SEQ ID NO: 1577 - DNA, 320 bp, Homo sapiens
gatgcggaggtgttggtagggacggaactcggggcgcgggcggtggcccgagtggagataggagttgaaggtgcagagggccacgctgggcagcgccagcacgaaggtcagcagacgccaggtacgagctgcggacggagcggggtgagcgcggcggtcctggggcggcgggcctgtgaacaggtgggcagggtaggggagcccccggatccgcccgttccccactcacctcctgctcctccgtggcctcctttggcagcgctggccaagccccgggtcaggggcctcagaggcaaagccatgatggtgcggggagccgg

SEQ ID NO: 1578 - DNA, 580 bp, Homo sapiens
gatcgcctgtgagtgaggggcatctgctgggggtgggagagggtgggatgcctgatgggctttctcgctcactgctgggtgtccccacagctgggcccccgaggaggacccggccactgaggggggcgccactcctgtcccccgtacactgcgaaagaagctgggcaccctctttgccttcaagaagcctcgttcaacgcggggtccacggactgatctagagaccagccctggggcagctccccgaacccgaaaaactacatttggcgacctactgcggccgccaacccgtcccagccgtggtgaggagcttggtggggctgagggggacaccagcagccctgaccctgccggcaggagccgacctcgctacacaagagatagcaaggcctactcgatgatactgctgcctgccgaggaggaggcaacgctgggtgccagacccgacaaggtgaggcttgctgatggggggtggtgaaggcgcttctgggacccagggcgcggactgtctccaactcgagcatctctgtccctagcggcggcccctggagcggggagaaacagaactggctccatcctt

SEQ ID NO: 1579 - DNA, 2874 bp, Homo sapiens
aggatcccctgcaggtccccaccaacaccgagacctcagaggaaacccgcccgtcgctggactttccccaggaggccaaggagcctgaaactgccgaagagtcagccccggacagcacagaattcacagaggctttgcgttctcctccagccgcctgtgcgggagaaatgggagcaagccccggtctcctgataccagagcagccgccgcccagcagacatgacaccggcacccccaagccgtcgggaagcctcgccaacacggcgccccacggaagctcgccaacgccaggtgtgggcagcctgctgggtggtcctgggggcacacaggccccagtctcccacaacagcaaggacccccctgcccgccagcctggagaatttctggcacccgtggctaacccctcaagtaccgcctgccccaaacccagtgttctgtcttcaaagatctccagttttggctgtgaccctgctggttttaacagagaccccttgggggttccagttgccaaaaaggggcctcagccctacagcagcccccacagtgagttgttcctcggacccaaagacctggctggctgtttcctggaagaactgcaccccaagccctcagccagggatgccccgccggccagcagctcctgcctttgccaggacggcgaggatgccggttccctcgagccacagctgccaaggagcccacctggcaccgctgagacggagccaggcagggctgcatcgccaccgaccttggagtcctcatccctcttcccagacctgccggtggacagattcgacccacccctctatggcagcctgtctgcgaacagggactccggtctgccgttcgcatgtgccgaccctccccagaagacggtgccgtcagatccaccgtacccctcttttttgctgcttgaggaagtatccccgatgctgcctagccattttcctgatctctcggggggaaaggtgctcagtaagacgtgtccccctgaacggacagtggttcccggcgccgccccatctttgcctgggaaggggagtggatgtagcgttgctcttatgagtcacctgtccgaggatgaactggagatccagaaattggtcaccgaattagaaagtcagctgcaaaggagcaaagacacacgtggggccccgagagagcttgcagaagctgagtcggtgggcagggtggagctcggcacaggcacagagccaccctcccaacggcgcacctgccaggccaccgtgccccacgaggacacgttctcggcagctgacctcacgcgcgttggagaatccactgcacatcgggagggtgcggaatcggctgtggccaccgtggaagcggttcaggggaggcctggggggacgtggccctgcccagcctccttccatccgggacatgcagcccttctcccctgtgcccaggaagacctggtttctggggctcctttcagccccaggggagccaacttccattttcagccagtgcagaaagccggagcctccaagactggactttgccaggcagaaggagacagcaggcccccccaagatgtctgcctgcctgagcccagcaagcagcctggcccacagctggatgccgggagtttagcaaagtgcagccccgaccaggaactttcatttcctaagaataaggaggccgccagctcacaagaaagtgaagactccctgcggctgcttccctgtgaacagagaggagggttcctcccagagcccggcacagcagaccagccccaccgaggggcccctgctccagaagcttttggcagccctgctgtccatctggcccctgacttggcatttcagggtgacggggctccacctctggatgccacctggccttttggtgccagtcccagccatgctgcccagggacattctgcaggcagagcaggtgggcacctccaccccacggcagggaggcctggctttgagggtaatgagtttgcaccggcgggggcctcctcactgactgccccccggggcagggaggcttggttggtccctgtgccaagtcccgcctgtgtatccaacacccaccctagcaggaggtcccaggacccagctttgagcccccccatacgtcagctccagctcccagggcctggagtggctaagagtaaagatggcatcctgggcttgcaggagctgacacctgctgcccagagccctccacgagtgaacccctcaggtctggaagggggcactgtggaaggagggaaggtggcctgtggccccgcccagggctccccagggggtgtgcaggtgacaactctccctgcagtggccggacatcagctggggctggaggcagatggacattggggcttgcttggccaagccgagaaaacccagggccaaggcacagccaaccagcttcagccagagaacggggtgagcccagggggcacggacaaccacgcctcagtcaatgccagtcccaaaacagcgctgaccggccccaccgagggtgcagtcctgctagagaaatgcaagggaagcagggcagccatgagccttcaggaggaggccgagcccaccccaagccccccgtcccctaatagggagtccctggcgctggccttgacagcagcccacagccgaagtggatctgagggccggactccagagagggcgtccagccccggcctgaacaagccactgctggccacaggggatagcccagcaccctctgtcggggacctggccgcctgcgccccctcacccacttcagccgcccacatgccctgcagccttgggcccctgccccgtgaagacccacttacctcgccttccagggcccaaggtgggctgggggggcagctgccagcatctccgtcctgcaggg

SEQ ID NO: 1580 - DNA, 329 bp, Homo sapiens
cctggaggcttcgcaggtggcgcctgcagggctggaagagaggcttcatcccaagtgctaaatctgagctggcgcccagagggctgggttgaaaaggggctggaggctgcctccagcctccgtaggaaagcatgctgtgatctgttagtcacgtctgcccccggcgtggagggagaacggctgcacatttgctgctgcagagtgtgccatcccactgggcgctgtgcctaggccagggcgacagggaggagatggggtttagaggagggaaaagaagctgggacaaacataaaagaatacttgccaccgagccggtgcttcccgaggcc

SEQ ID NO: 1581 - DNA, 387 bp, Homo sapiens
gctctcactttggtggcacttgaggagcccttcatcccgctgctgcactgtgggagttcctttccgggctggccaaggccggagccggctccctcagcttgtggggaggtgtagagggagaggcgcgggcgggaactggggctgcgcgcggcgcttgcgggccagcgcgaattccgggtgggcgtgggctcggcgggccccgcacgctgagcggccggcccacgccgccagcccccggcagtgaggggcttagcacctgggccagcagctgctgtgctcaatttctcgccgggccttagggccttcccacggggcagggctcgggacctgcagcccgccgtgcctgagcttccccctccccccgcccgccccgacctccgtgggctc

SEQ ID NO: 1582 - DNA, 558 bp, Homo sapiens
gctgagctcttgctcagtgcttcaattactcagcagggagagagattgtcaggacaactcaaaaactccaaggtgcagtgaaaaccccacccagcccaccactggcctctcacccacagcttcaaagagggaaggccagggaaaaaccccacggtcattaaatagattgtgttgggggaaagttatcatttcggtaacatcgacggaaacatcaggaaatttccgcttctgagacacatgatctccatccttccttccctctggcaacttcaggagccgcctcgcctgttcctgactcaacaccaaagctcccggcagatccctcaccttcttgaaagcagctagcccgaggtctgacccggtattgatcctgaagtgcagacaggaggcagccggagaaaccgaacgagactcccataattacatggagataagactatcaggtgtaattaaacagtatccacaggcagaccacttggctacatcctccgtctctcccctccctcctcctccttttccccaggactgcaaaataaattatcctgtgaagtcagcaga

SEQ ID NO: 1583 - DNA, 609 bp, Homo sapiens
tactctgagcacaagtggataatgtaggtttttttctctctctctcctcttttcgccttggtgttagagaggactattatgggaaattaatcacgagacatggcagtgaaagtgatctatcactctttcaagcgcacagacccactatatacgatctatgacagcagctacaaatgtgcgagtgacactgtttgggagaagcgggcaggcggggatgggggcgcctcacggaagcccctgtgatggcctggccggggccccaagtcctccgggtcggatggtgctggaaagtgccttgtacacgagtttccctgggcttgcttaggtgtctccaaagcctggctcatacccacgtgggggaaacactgtaatccctgaaggctgggggagctggggcctggacggctgtggggaagcctactggatttttctcccaccactggaagggcaggcctggcggaacagcccctgggaggaggacctgcaagaacaagccaggcctcaggctccccgtgcaaaaccggggttgaggcccccttgccgtgccttccctaacagaagcaacacggtgcagagtaggggtcaaatgagcaaacccacaggaaggca

SEQ ID NO: 1584 - DNA, 929 bp, Homo sapiens
tcaaaggaagatctcagctagccatgaacaacttggatattttttaattccttgaaaacagaattcaaaaaggatgctttaaaatgatgtgtgcgtcggaccagggggaatattccagtacctctgaggaacgatgtcccaggttgggccccgggctggacgaaggacccttattaaggcgttggcgtgcttatttatggaacattaaataccgtttgtttgcgctgtgacgaggccatcctatttgcctttgtaaatctttctcgctggcagattgttgggggaacggcgtctgggaagctgttgctgtctgtcatgccgcgggcctgaccacgtcccggtgccactgtgaggcagcgtttcccaggcctgctaagcacattgcttccaacagcaaggtcttggcgtggatcgccctgcttcgttttgttttatttccaatacattcacagttgtcatctggcctcacccacagcagactccgtggctgtctggagaggtgacagcagtgcctgggggtcgacctgtggttcagccccagcaagtgctgaagggaatgttccttaaaatgaaaaataacgtcgtctgtgatggccgcctctcagagtttgtgaaagatgagagatctggctgtggctggagttggtgattcttgtcagcagtgctggcctgatgcgcaaggcagaggcgtggctgtcctgccctgcgcacagcgagtgagggagtggctgtctgggaactgcgtgtcgtgaggggcaggtgccctggggctcagcacggcggggtctgcaaggttagaatgctgtgcacctgtagggagccctgaccagaagtatttcatgtattaatttaatgtcaggcaccgatacagttttttgtggttgttcagaaacgagaaaggtgtgtggttctgaagtgaattatttctc

SEQ ID NO: 1585 - DNA, 451 bp, Homo sapiens
ctagcttccccagcagacccctccggtgtccgcctgcagtccccgtggctgtcccctgtgcctgcgtgcagcacccctcggcagaccctcctgtctccgcctgcagccccccgccccccggcagaccctcctgtctccgcctgcagtcccccgcccctcggcagaccctcctgtctccgcctgcagccccccgccccccggcagaccctcctgtctccgcctgcagccccccgccccccggcagaccctcctgtctccgcctgcagccccctccagcagacccccccgccttgggtttccgccaggacctaaatgcagtgtctgagttgccgcgacagtgcccacagagccccagatgacacgcgttcattttacttcacatataaattagagaaaagagtcttggtgaggacgtcggtgctgagacgaaatcgcgccagtgaacgtgttt

SEQ ID NO: 1586 - DNA, 630 bp, Homo sapiens
gccaaccaggccctgcctctcacgtggtctgatcccctggggaggacaagggaggatggggcagcaggtccatgacccagttacaagctgtttgtcttcctgcctctgtaactagccggggtcaccactgacgtgggcccccacccctgcccgcctccctggcacctgtccccggaaagggcacagagaaggggaggaacatagagaagggagggacagttagggaggaggaagggaactcagatctacgaggggccagatgagaaaaggaattaagaggagaggggaagtggggagggggaattcagagagagaggggggttggggagagaaggagttggggggacagtgatccctgcccccatcatggatgcctcccctgtcccttccagcagcctcttatcacagccccagtaagcgccagagcttgggtggcagccacggccccagctggacaacattgtccgggcctcctgcccgcctggcatctcctccacaggcaggtcctgcgcctctatgggtcctctctgccgcgtcccactgtgccccccaccacccccactgcccggcttccctggccagaccatctgggctctggtcccagctctgctgaccggctgtgtgaccctg

SEQ ID NO: 1587 - DNA, 369 bp, Homo sapiens
ttgcagtgagctgagattgcgccactgcactccagtctgggtgtcagagcgagactctgtgtcaaaagaaaaaaaaaacaaaaaaacccaaaaggctggcaatccagtgagttgtctttcaggaggaaaatgttgctggtgttgaggcagccgtgtgactgtcacgtgctccgtggcctgggcctctccgtgtcatgtgtctgcccaccacggtgcccggtgttcccggctggctctgatgtgtgctgtcagcttccagcatcggaatgtatgctgtctttgtgtacttggcctgtgggtcactggcccttttcccaaggtccttgccaccccttctccccggcccctccttccacctccccacccaga

SEQ ID NO: 1588 - DNA, 707 bp, Homo sapiens
tgcccgctccagctgcgtggctgattggagggtttccagcccagtgttgctgattggataacgcttaaatccccgcctcctcacatcgtgattgacagaagatgtgaccaaacgctaggctgaatgaagaaagagtgactgcctaagctgccgcccgctcagaaagggcttcgtccctgagctgagccaggcccaccctagagggtgtttgcatgtaatcttgtgtataaggttatatgcatttataaatattatactgtatggctattcacaaatgaaaagaatataataataatgattttgaaatttcaggttttataaccttcctggctttgagaaggcagcatgagattttttgtctttgtttttgttttttgagacggagtcgctctgttgaccaggctggagtgcagtgacgcgatctcggctgactgaaagctccgcctcccgagttcacgccattctcctgcttcagtcccctaagtagctgggactacaggcgcctgccaccatgcctggctaattttttgtatttttcgtagagacacgtttcaccgtgttagccaggatggctcgatctcctgacctcgtgatacgcccacctcggcctcccaaagtgttgagattacaagcgtgagacactgcatccgtctgttgtaacaatttaattaaagcaatatatccaaaatattattttaatatgtgag

SEQ ID NO: 1589 - DNA, 407 bp, Homo sapiens
tggcgggcaccggttccagccacggtttagccgagaacagggggaaccgcagcagcagatggagcgcccacgtccggggtcgcctcggctctaacccttggtcatggctcagcttggtgcgcagaaacccgacgtcaatcagagcattttgcgcagctgggcgagctttcctcggcatgcggggcagttcccccatcatctttatgctgccacctccgctttcatcagagagttacacaggatggtgcaggggcccggagacaccgtggaagagtccaggggagtgaggaggggctgggccgggcagcctcaggcccagcgcatgatggcgccccctcacgcctgagcagaaatcagccactgccacctcggagaggacagaggggcccaggcttccccagccagcc

SEQ ID NO: 1590 - DNA, 808 bp, Homo sapiens
gcctttgattcactaatctctgacattgagacattttttgaagtctgttgctataattagaattctataagccatttcatgtctctatcaaaattttaagagacatagaaaatttaaggttttttttggcttacaattcatcatatcaatgcgaatcttattgcagtttgggcttcagtgtggagcagtatttcggggccagagacacgcgttctgtcatcagggctgtgttgagagcagcccctgtgctgcccaacaacgcacagcttgaattttaagaattgcttgtgaattgtgtttctgccttgttttgatttgtttttcccagccaaaatgtggggctggaggcaggagactgtgtcattcagaatctgtgcctgcttccccacccatgggctgtatctgtgtgtgccccggctgggcgggtggacgggaggagtcgcgggggaggcttggttcctggggacatgtggggtggcgccgacagctccagccgggctcaggtgagtcacggctgcgctttgagatgggtaattggtggcatgtggtccgtgagccatgtgtgagagcccttccttagtcataggaaagggaacaagcgtcgcaaataaaagcctcatcagattagtgagtcagaaaagacgctaatcccaacccgatgcttcatttctactttttttttccccttccaaaagcagaagctgttcctgttctttaagaaaaaaaaattaaaatcagttttctaaaagactgatttaaccacaatcaaaagtggaggggggtgtgggccgtgtcactattgctgtat

SEQ ID NO: 1591 - DNA, 333 bp, Homo sapiens
gggttgcagcctgcctgagcatagcttagtccccgctcatccaccctcgtttcctggccctgtgctccctctcccactatccaggcccagcacctcggctgcgcctggccgatggcccccacgggtgcgccggccgcctggaggtctggcacgggggtcgctgggggtcggtgtgtgacgacgcctgggacctgcgagacgccgctgtggcctgccgagagctgggctgcggaggggcgctggccgcccccgggggcgccttctttggggaggggtctggacccatcatcctggacgaccttcggtgtcggggaaacgagacggccttacgat

SEQ ID NO: 1592 - DNA, 441 bp, Homo sapiens
ggcttgaacaaaccactaggtccaatgccaccctgtcacttcagccttgccccgccccatctgccaccaaccaaccaggacagcacctgcgcagcaaactccagcagcccccatcaaacatggcatctaggtgggcggggcctgagcagatcgtcatatccaatgctacacagtcacttcagccttgccccgccccctctgctaccaaccaaccagggcagcacctgcacagcaaacctcagcagcccccatcaaacatggcgtccaagcgggcagggcctgaacagatcgtcacatctaatgctacccagtcacttcagccttgccccgccccatatgccaccaaccaaccaggggagcacctgcgcagcaaacctcagcagcccccatcaaacatggcgtcaaagcgggcggggcctgagtggatagttacccaatcac

SEQ ID NO: 1593 - DNA, 377 bp, Homo sapiens
gggtttgctcgtggtggtggtgtggtgtgtctgggtgtctgtcagcccctctttcccagtatcaggctgccgggactctagtgtcagcgcggggcaaagcagggccttcctgtcctgttggccatgggcgggtcctcgttggaacaagcaacgatggtgtgggcattatgagaaaaagggcccgcggggctgggctggctgttcgcccctgggcagccctggcggcgactctgggtgtgtggggcaagagagggccttgcaagaggggcggcgtgggatccaaatcaatttttccgcggcaaggcggaggaccagagatgatcccaggactgtgggccatgggccctgacgcctccgagcacaccctgtcctgagcc

SEQ ID NO: 1594 - DNA, 314 bp, Homo sapiens
gagaggaatcagcagtcgaaggaacagcgggccaagcgcagtcgtgacgtggcgttcagagagcggaagttgtcagatttcaccgggccgtaaagcgcgctggctgtgtcatcttccggttagcgacaacggctctgaccgtctggcaggccgcgtggcgcccgcgccggccttcctgcaggggactccaccggagccttgccaattccgtttgtttccctgttgtcgcccgcttcaccctggatcatgttcaagaagtttgatgaaaaggaaagtgtgtccaactgcatccagttgaaaacgtcagttattaa

SEQ ID NO: 1595 - DNA, 371 bp, Homo sapiens
aactcgtttggatcattacacctccatctgctgctggcactgtatagaacctgacctctgggagcttttaatgaaaattaattttctatccacataggggcaaatgccagttggtccctgggccaggcagcttgctggaaagaggtgctttcggctggctaccggtgcgcggggaccacactcacaaaccgcattccggtcttcccgcccgaaaatccgcgctgtgcgagggacccacaagactggcggtctaaaagggacccgcctcacttggaaacggggctgcggtagccacaaccctccggtagcggtagcgtaaccccgttcggtgatccagccgcacagcgcaacgggtacaaagaaccccactg

SEQ ID NO: 1596 - DNA, 354 bp, Homo sapiens
ctttgggggatcccaaacgtttcccagggtccaactgtgttcgcctccttccgtgctgcgtggccacatggatggtggatgcaggggtgcaaggatgcacggtgcctgtggtaccctggctctaagagggatgcattagactaaacgggatcgcaacttgcggtggttcgcccgcctgcagctcttatacagcagcccgtgccgtgcgccctgcttgctgcagcccgccctgtgtaactcatccagcctcccctcccccagggttctgcaggtcagatgaccccctgcctcctgcccagttgctctgtgcctagacgtggctcgccaatctgtctcactggtgagaccgacctg

SEQ ID NO: 1597 - DNA, 378 bp, Homo sapiens
ttgaggaggaagcagcagagatggaaggagccgctgatgccgcggagggaggaaaagtaccctctccggggtacggatcccctgccgccggggcagcctcagcggataccgctgccagggcagcccctgcagccccagccgatcctgactccggggcaaccccagaagatcccgactccgggacagcaccagccgatcctgactccggggcattcgcagccgatcccgactccggggcagcccctgccgccccagccgatcccgactccggggcggcccctgacgccccagccgatcccgactccggggcggcccctgacgccccagccgatccagatgccggggcggcccctgaggctcccgccgcccctgcggctg

SEQ ID NO: 1598 - DNA, 358 bp, Homo sapiens
gcggcggagagcgagaagaagacggccgcggcggctgccgaggtggctgccgaagctgcggcggcggctgcggcgttggccgagccgagagagccgctcgcgccgcggaagagcggggaccccgagaagctcgcgaagaaccccaagaacccggcgcgggaggcgctccccgaaaagttcctaacagacaaggagcgcaagaagctcgagaagaagctgctggagcagaggcgaaaggaggagaagaagaaggagaaggagaggaagaagatggagaagatgctgaagaagaagaagaagaaggtgccagaagcccaggaggaggcccgatgccccgaggccgccgccgccgcggccg

SEQ ID NO: 1599 - DNA, 480 bp, Homo sapiens
catgaagccaggaaataagccagaccccacagctcctccaaagacccctgacgctcctggttgaccctctcatggggacggggcttctctcccctcagcagagccaggagctgcctcaaggcccatgcacctgccagtccagcctgtcccccgggctgccttctccctccctggcttctggatagggaccgttgcccagtgcttcctgagtccagccacctggtgggcacccccagagactcagccctgactccaggcggccagccggcagcacaggtacagccggatgcccgacacacagacatgcaggcacaaatgaacagacgcacgagcacatacatcctgaccgtttccaggggctccaggacaccccgccaagttctcccctgcaccccacacagccacccacaggtatgcacagctcacccaggtcacacacacgcaccagggtatggatgtaaccctgtgcctgcagcccca

SEQ ID NO: 1600 - DNA, 401 bp, Homo sapiens
gggacggctgggaaggcccggcggggaaggtggctcggggggccccgtccgtccgtccgtccgtcctcctcctcccccgtctccgccccccggccccgcgtcctccctcgggagggcgcgcgggtcggggcggcggcggcggtggcggcggcggcggcggcggcgggaccgaaaccccccccgagtgttacagcccccccggcagcagcactcgccgaatcccggggccgagggagcgagacccgtcgccgcgctctcccccctcccggcgcccacccccgcggggaatcccccgcgaggggggtctcccccgcgggggcgcgccggcgtctcctcgtgggggggccgggccacccctcccacggcgcgaccgctctcccacccctcctccccgcgccccc

SEQ ID NO: 1601 - DNA, 365 bp, Homo sapiens
ctctctctttctctctgtctctctctgtctctctctctctctctctctctctctctctctctctctctctctctctctctccctccccctccctccctctctccccttccttggtgccttctcggctcttgacacttagccgctgtctcgccgtgtcccgggtcgaccggcgggccttctccaccgagcggcgtgtaagagtgcccgtcgggacgagccggacccgccgcgtccccgtctcggtcggcacctccggggtcgaccagctgccgcccgcgagctccggacttagctggcgtctgcacgtgtcccgggtcgaccagcaggcggccgccggacgctgcggcgcaccgacgcgagggcgt

SEQ ID NO: 1602 - DNA, 406 bp, Homo sapiens
atcgctctactgatcctttctttctttctttctttctttctttctttctttctttctttctttctttctttctttcttgatgaattatcttatgatttatttgtgtacttattttcagacggagtctcgctctgggcggggcgaggcgaggcgaggcacagcgcatcgctttggaagccgcggcaacgcctttcaaagccccattcgtatgcacagagccttattcccttcctggagttggagctgatgccttccgtagccttgggcttctctccattcggaagctttgacaggcgcaaccccacccagaggctggctgcggctgaggattagggggtgtgttggggctgaaaactgggtcccctatttttgatacctcagccgacacatcccccgaccgccatcg

SEQ ID NO: 1603 - DNA, 544 bp, Homo sapiens
cgcattctgcctctccgtgtgtctgcagcgacccgcgaccgagtccttgtgtgttctttctccctccctccctccctccctccctccctccctgcttccgagaggcatctccaaacacccacgcgccgtgggttgtcttctgactctgtcgcggtcgaggcagagacgcgttttgggcaccgtttgtgtggggttggggcagaggggctgcgttttcggcctcgggaagagcttctcgactcacggtttcgctttcgcggtccacgggccgccctgccagccggatctgtctcgctgacgtccgcggcggttgtcgggctccatctggcggccgctttgagatcgtgctctcggcttccggagctgcggtggcagctgccgagggaggggaccgtccccgctgtgagctaggcagagctccggaaagccccggtcgtcagcccggctggcccggtggcgccagagctgtggcgcgtcgcttgtgagtcacagctctggcgtgcaggtttatgtgggggagaggctgtcgctgcgcttctgggcc

SEQ ID NO: 1604 - DNA, 459 bp, Homo sapiens
gggtataggggcgaaagactaatcgaaccatctagtagctggttccctccgaagtttccctcaggatagctggcgctctcgcagacccgacgcacccccgccacgcagttttatccggtaaagcgaatgattagaggtcttggggccgaaacgatctcaacctattctcaaactttaaatgggtaagaagcccggctcgctggcgtggagccgggcgtggaatgcgagtgcctagtgggccacttttggtaagcagaactggcgctgcgggatgaaccgaacgccgggttaaggcgcccgatgccgacgctcatcagaccccagaaaaggtgttggttgatatagacagcaggacggtggccatggaagtcggaatccgctaaggagtgtgtaacaactcacctgccgaatcaactagccctgaaaatggatggcgctggagcgtcgggcccatacccg

SEQ ID NO: 1605 - DNA, 390 bp, Homo sapiens
tattcaaacgagaactttgaaggccgaagtggagaagggttccatgtgaacagcagttgaacatgggtcagtcggtcctgagagatgggcgagcgccgttccgaagggacgggcgatggcctccgttgccctcggccgatcgaaagggagtcgggttcagatccccgaatccggagtggcggagatgggcgccgcgaggcgtccagtgcggtaacgcgaccgatcccggagaagccggcgggagccccggggagagttctcttttctttgtgaagggcagggcgccctggaatgggttcgccccgagagaggggcccgtgccttggaaagcgtcgcggttccggcggcgtccggtgagctctcgctggcccttgaaaatccgggggagag

SEQ ID NO: 1606 - DNA, 582 bp, Homo sapiens
gcctggactccggggaatgactcacgaccaccatcgctctactgatcctttctttctttctttctttctttctttctttctttctttctttctttctttctttctttcttgatgaattatcttatgatttatttgtgtacttattttcagacggagtctcgctctgggcggggcgaggcgaggcgaggcacagcgcatcgctttggaagccgcggcaacgcctttcaaagccccattcgtatgcacagagccttattcccttcctggagttggagctgatgccttccgtagccttgggcttctctccattcggaagctttgacaggcgcaaccccacccagaggctggctgcggctgaggattagggggtgtgttggggctgaaaactgggtcccctatttttgatacctcagccgacacatcccccgaccgccatcgcttgctcgccctctgagatcccccgcctccaccgccttgcaggctcacctcttactttcatttcttcctttcttgcgtttgaggagggggtgcgggaatgagggtgtgtgtggggagggggtgcggggtggggacggaggggag

SEQ ID NO: 1607 - DNA, 428 bp, Homo sapiens
gggaggctggggacgcccttcccggcccggtcgcgggtccgcgctcatcctggccgtctgaggcggcggccgaattcgtttccgagtccccgtggggagccggggaccgtcccgcccccgtcccccgggtgccggggagcggtccccgggccgggccgcggtccctctgccgcgatcctttctggcgagtccccgtgcggagtcggagagcgctccctgagcgcgcgtgcggcccgagaggtcgcgcctggccggccttcggtccctcgtgtgtcccggtcgtaggaggggccggccgaaaatgcttccggctcccgctctggagacacgggccggccccctgcgtgtggcacgggcggccgggagggcgtccccggcccggcgctgctcccgcgtgtgtcctggggttgaccagagggccccgggcg

SEQ ID NO: 1608 - DNA, 445 bp, Homo sapiens
cccccggcgccccctcctccggtcgccgccgcggtgtccgcgcgtgggtcctgagggagctcgtcggtgtggggttcgaggcggtttgagtgagacgagacgagacgcgcccctcccacgcggggaagggcgcccgcctgctctcggtgagcgcacgtcccgtgctcccctctggcgggtgcgcgcgggccgtgtgagcgatcgcggtgggttcgggccggtgtgacgcgtgcgccggccggccgccgaggggctgccgttctgcctccgaccggtcgtgtgtgggttgacttcggaggcgctctgcctcggaaggaaggaggtgggtggacgggggggcctggtggggttgcgcgcacgcgcgcaccggccgggcccccgccctgaacgcgaacgctcgaggtggccgcgcgcaggtgtttcctcgtaccgcagggccccctcc

SEQ ID NO: 1609 - DNA, 1172 bp, Homo sapiens
gggcgcgggtcgggccgtccgcctcctcgcgggcgggcgcgacgaagaagcgtcgcgggtctgtggcgcggggccccggtggtcgtgtcgcgtggggggcgggtggttggggcgtccggttcgccgcgccccgccccggccccaccggtcccggccgccgcccccgcgcccgctcgctccctcccgtccgcccgtccgcggcccgtccgtccgtccgtcgtcctcctcgcttgcggggcgccgggcccgtcctcgcgaggccccccggccggccgtccggccgcgtcggggcctcgccgcgctctaccttacctacctggttgatcctgccagtagcatatgcttgtctcaaagattaagccatgcatgtctgagtacgcacggccggtacagtgaaactgcgaatggctcattaaatcagttatggttcctttggtcgctcgctcctctcctacttggataactgtggtaattctagagctaatacatgccgacgggcgctgacccccttcgcgggggggatgcgtgcatttatcagatcaaaaccaacccggtcagcccctctccggccccggccggggggcgggcgccggcggctttggtgactctagataacctcgggccgatcgcacgccccccgtggcggcgacgacccattcgaacgtctgccctatcaactttcgatggtagtcgccgtgcctaccatggtgaccacgggtgacggggaatcagggttcgattccggagagggagcctgagaaacggctaccacatccaaggaaggcagcaggcgcgcaaattacccactcccgacccggggaggtagtgacgaaaaataacaatacaggactctttcgaggccctgtaattggaatgagtccactttaaatcctttaacgaggatccattggagggcaagtctggtgccagcagccgcggtaattccagctccaatagcgtatattaaagttgctgcagttaaaaagctcgtagttggatcttgggagcgggcgggcggtccgccgcgaggcgagccaccgcccgtccccgccccttgcctctcggcgccccctcgatgctcttagctgagtgtcccgcggggcccgaagcgtttactttgaaaaaattagagtgttcaaagcaggcccgagccgcctggataccgcagctag

SEQ ID NO: 1610 - DNA, 682 bp, Homo sapiens
tgacgggcgtgagccactgcgcctggactccggggaatgactcacgaccaccatcgctctactgatcctttctttctttctttctttctttctttctttctttctttcttgatgaattatcttatgatttatttgtgtacttattttcagacggagtctcgctctgggcggggcgaggcgaggcgaggcacagcgcatcgctttggaagccgcggcaacgcctttcaaagccccattcgtatgcacagagccttattcccttcctggagttggagctgatgccttccgtagccttgggcttctctccattcggaagctttgacaggcgcaaccccacccagaggctggctgcggctgaggattagggggtgtgttggggctgaaaactgggtcccctatttttgatacctcagccgacacatcccccgaccgccatcgcttgctcgccctctgagatcccccgcctccaccgccttgcaggctcacctcttactttcatttcttcctttcttgcgtttgaggagggggtgcgggaatgagggtgtgtgtggggagggggtgcggggtggggacggaggggagcgtcctaagggtcgatttagtgtcatgcctctttcaccaccaccaccaccaccgaagatgacagcaaggatcggctaaataccgcgtgttctcatctaga

SEQ ID NO: 1611 - DNA, 954 bp, Homo sapiens
aaaatatataaaataataagagttatactagatatagatcatagatatgattatatgtgaatatcattaatcattggtttgtagcaattactctttattccaatattataataatccttgctctacaattataacctgggaaaaaccagaccgtacagagataggaactgaaggggcactgtgagaagtgaccagaagacaagagtgtgagccctctgtcacgcccggacagggccaccagagggctccttcatctagcggtaatgccagcgtctgggaagacgcccgttgccaagcggaccgtggtctagtggtagcatcagtgccaaggagaaacacctgctacttagcagaccgggaaagggagtctccctttccccggggtagtttagagaagactctgctccacacctcttgtggagggcctaactgatcgcccacagttatccggaggcctaaccgtctccctgtgatgctgtgcttcagcggtcacactcctgtttcactttcatgttccactctgtacacctggctctgccctctagatagcagtagcaaattagtgaaagtattaaagtctttgatctttctgaaaagagcatagaagaaataatgacgtaagctgtcctctctctctccgcctcgactacctaacagggaagggccccctgtctggtggacacatgactcacgtgaccttgtcaatcattggagatgactcacactctttaccctgccccttttgctttgtatccaataaataacagtgcagccaggcatttggggccactaccgatctccccgtcttggtggtagtggtcccctgggcccagctgtcttttcgtttatctctttgtcttgtgtctttatttctaccatctctcgtctcctcacatggggagaaaaacccacagaccctgtaaggctggcccctacaggtgtgacctcatctga

SEQ ID NO: 1612 - DNA, 603 bp, Homo sapiens
cacatgggcacagcagcccctcttctgggggtgtctgctgggggaggggaggctggcggtatccctggccggcctgtgaccaccctaaagggagggcagaagccgagtcaccctgagccctgagagtggtgacccgcagaggctgggccgccggggtgccctttggccaaggaggtgccggttcccgggacacgtgacccgggccactgagatggtcccaggcccaagcccagaggggacgcgggcttcccctggccgtgctccaggctgtgtgtggatgggggctgtgggcttcccctggcagtgacccaggcctgtgtagaggcaaaagtgggcaggtgtgagttctccaaaaggctgagccatctggttgacattctccatctgcctctgcagggagcccccagcccggagcccttccagcagcctgcagcccaggcaccccgcaccccgacctgtggtctggaagcttcaccgggccctccaggcacagaggggtgccggcctggcccctgttatgggtcagcctctccgggatggtggccgccaacactcgggcccccgaagacactcgggcccccgcaggacccaagcccagctcct

SEQ ID NO: 1613 - DNA, 412 bp, Homo sapiens
ctgtaagtccacttcctagctaagagggccaagcacatttagaagcctccgtgccagggaaagcccaatgccattgccaactgcactacatcgccgttcttctgaaggaaattactattgatcccacagctctcctccccatgctgtttgccggggacagccaaggattcccgtgccagctgggctcccacacggctcgactgttcctgcaccagatggccagaccaacaccctctggctgccgcacgctccctgggagacgaggctctgacgtctatcagcctggctttttgtgcacagggacgccggggtcagggattacagggccaatcacattacactaaaaatctctgcacagcgtaaagatttccaaatcccagtggttatcagtgtaaccaacaaggcagggaaa

SEQ ID NO: 1614 - DNA, 394 bp, Homo sapiens
acccccgcgtggacctccccctcagctggggtgcggaggctcagcctgggggcccagttgcccctggtccccaagcagcagccccctctgcctccagggtgggcctggagcaggaggggggcctctgcccgggggccgggctctctggggccgccgtcgcgccgccccctccccgcaccgcataccttgcccacagccgagcagctgggaggctatttataaaggcgggtgagatcagcggccggccaaggctataaattcgcaggccgcggccgggccccacaggagcagccgcccggggcaccggagctgcgggctgcgtggccgggatgagcgccagcacgggcggtggtggggacagcggcggcagcggcggcagtagcagcaggtaggg

SEQ ID NO: 1615 - DNA, 164 bp, Homo sapiens
ccgcatgggctggactgtcaaatgcatgttataaagatgatgtttttggtaacttgcgaatggaaacgggtgcacggtcggtttggctctcctgccctgagatttattaggttaaaggaaactcgactggagagcccggggcctcgcgccgcttgcgtctggcg

SEQ ID NO: 1616 - DNA, 73 bp, Homo sapiens
ccgacagccggagaacacaggcttcgcacagcttggtccggctggaatgaattctttcctgccactgagcacg

SEQ ID NO: 1617 - DNA, 88 bp, Homo sapiens
ccgctgctcatccaggaaggtcggagatgtcgggccctcccacctgggtcacgcgctaggcatgcctgagagcaaaggccacgccccg

SEQ ID NO: 1618 - DNA, 81 bp, Homo sapiens
gcgagagtgcagggcgcgggccgggcctgccctacaccgggccgcctctgatcacgttttcagggccactgcccgccagcg

SEQ ID NO: 1619 - DNA, 33 bp, Homo sapiens
gcggaggcggggtggggggctcgggctgggccg

SEQ ID NO: 1620 - DNA, 122 bp, Homo sapiens
ccgtagccactcagcacttaacgccatttactgcaggcagacagggagagaccagcttgcgccccggccactgggatcgtgaaggaatctcttctgagggtgaagtaagctcggctgggtcg

SEQ ID NO: 1621 - DNA, 178 bp, Homo sapiens
gcgtgcgtctggatctttgtttggccctgtatattcaagggtgaaggagagagcctggtgatcctggtaactgagacttgctgggtttgtgcctgcccttccttgagactgttggtgactgtgtctgactgggtgtgaaactgagtgtgtggctgtatgagagaatatcgatgggccg

SEQ ID NO: 1622 - DNA, 22 bp, Homo sapiens
ccgggctgacggccgttcagcg

SEQ ID NO: 1623 - DNA, 62 bp, Homo sapiens
tcggaactgccccctctctgagctggagaaggaggcccacgagagcacaccggagatatccg

SEQ ID NO: 1624 - DNA, 70 bp, Homo sapiens
acggtgcaaaggaaacgccgcacacttccacctttccttcccgccagcgccccaccaaacaacctgatcg

SEQ ID NO: 1625 - DNA, 34 bp, Homo sapiens
ccgcaggacatcacatgccgggtacctaacgtcg

SEQ ID NO: 1626 - DNA, 177 bp, Homo sapiens
ccgccgcttgcctcagctcctgcgtgcaggtgcagccctcgcttccctccacactttctccagcgggtgtcagttcctccacaagagacagacagcgttctgcagaaccacagcgctcaaggccttcgagagccaaaaatctcggagcgagctgccctgtcctggctgtacctcacg

SEQ ID NO: 1627 - DNA, 27 bp, Homo sapiens
acggtgcacggcgcagattgagaagcg

SEQ ID NO: 1628 - DNA, 177 bp, Homo sapiens
acgtctccggaaccctgcccactcacctctccgtcaaagtccctcgctggggcatcacttccttggtccatgcctccagaggacaaagagccctctgacggggagggcatgggctgccgcttggcactgtagcttcctccagagaattccctctttaatgcgctgccattctgtgcg

SEQ ID NO: 1629 - DNA, 39 bp, Homo sapiens
ccggaggtctacggtggccatgagggtttcacgcctgcg

SEQ ID NO: 1630 - DNA, 30 bp, Homo sapiens
acgacagggaagacgggcatgcgtacagcg

SEQ ID NO: 1631 - DNA, 3 bp, Homo sapiens
ccg

SEQ ID NO: 1632 - DNA, 88 bp, Homo sapiens
ccgggagctttctcagacccggttgccctggagactttcatctccacagataatcagtttagcggggagagttctaggttcatttgcg

SEQ ID NO: 1633 - DNA, 280 bp, Homo sapiens
gcgcttcggagaaccactgctgccattccctgatcgatagatgcttggggtgcttcctgtttctcagtaaagtgaagttgcggcgacctcgtgcctgccttatgtgcacctgtgccagcatctttctcaggtgggtaaggagaggtggaattctggtcacaggctacatgtaccttaaatttcaatagattccgtcaaattgcctctcagtatggctgtaacaatttatagatgagcttccacacaatattttacccaagttaaaaataaatcctggccg

SEQ ID NO: 1634 - DNA, 121 bp, Homo sapiens
acgccggccacgccccaccccactgcaccacgagctctcacacctggtcgcctgaacacaaccaaacccttcccatctggccctcgggttactggcgttatcacaactttttttcccaacg

SEQ ID NO: 1635 - DNA, 48 bp, Homo sapiens
tcggcctcagcaaagtgctgggattacaggcgtgagtcaccgcgcccg

SEQ ID NO: 1636 - DNA, 176 bp, Homo sapiens
acgtccaactctgcctagggcatgtgacagtggagagacatctagggtggtcctgcttcacaatgatatggcctatggtttgtcgtcttgaagccattcgtcctgggttctcagcgaagccttgtcaacgtcgctgatgtatcccaaatctttggaaagcagggaaatcctgctcg

SEQ ID NO: 1637 - DNA, 42 bp, Homo sapiens
gcgctattaagaggcttaaccagccgggcacggtggctcacg

SEQ ID NO: 1638 - DNA, 80 bp, Homo sapiens
gcgcccgtcgggagccatgacccctgacccatcgaggccgccgccgggccgggtggaggccgccgcctcaacagagcgcg

SEQ ID NO: 1639 - DNA, 188 bp, Homo sapiens
gcgactctgacttcctgtctcaatggaatattgaagaggaggctcggtagaataaacagtggaatccttgtccgggagtgactgcctggcaattgtttcatggaaaacagggaggggtgggggacaacaaccctgctctgttcactggctctttaatttagattaccaatgataaagccggggctacg

SEQ ID NO: 1640 - DNA, 261 bp, Homo sapiens
tcgacatggcctctggcttctcaacaaggcccccagtccatctgcctctgtgcccggcctgctgacacaccactgccctcgttctatgccaagcaccttccagtgtgccacccagggaccggtggcaggaagcaggctcctaacagacatggattgggctcctgggcacaattactctacttcttttttttttgagacggagtcttgctccgtcaccaggctggagtgcagtggcgtgatctcagctcactgcaacctccg

SEQ ID NO: 1641 - DNA, 91 bp, Homo sapiens
ccgctccaaggcggaggagctgctttccaggacaggcaaggacgggagcttcctcgtgcgtgccagcgagtccatctcccgggcatacgcg

SEQ ID NO: 1642 - DNA, 295 bp, Homo sapiens
ccgaagcttctgcttagtgcctgttcatctattgagagctgataataggatgtattttgcttttttttctttaaatggataaaaggataatgctttttcttttctttctttttttttttttcttttcttggcctccagtgtctatgcaagttatttttcagtccattaaaatgaatcattgtttatcatgttagttttcacatttcacaaaatgatgaacaatggacttttctttgttaaaagatgggggcttctgtcctcgggcactcgtgttcagaagataagactttctccg

SEQ ID NO: 1643 - DNA, 60 bp, Homo sapiens
gcgcagctcgggaccccagtccctccgtcagagccggtttagatgtggagtaatgaggcg

SEQ ID NO: 1644 - DNA, 182 bp, Homo sapiens
gcgtgcaggtgggcgaggtgcaggctctgctctcccggcagcccgtgcaggccacaggcttcctgtctctgctcatctaacctgaaccatcctaggaagggaggcagcgatgaggtttcctgactcagaaggaagctgaaaacgaccttagccctttttattgcacttccttttctgggccg

SEQ ID NO: 1645 - DNA, 204 bp, Homo sapiens
acgaccttcccaggccatgagtgcaggcatgagaggcacagtctgaacgagaccacatcactcactggcggtgcacctgtttctggaaaaaaaccctgactaggatgattcaccaactgccttcgctgaacaaatgtttcagaatctgagaagcagagccccaaggaagccacaagagcctggggtcagaaggcggcagcctcg

SEQ ID NO: 1646 - DNA, 170 bp, Homo sapiens
ccgtggaagcttctggagggatgggcgtggcgtggcgccatcatctctctgcattctccttgggagggctccagagccactggtcacgggcagctgccaggctgggtctggacaaatgaggtctgggtccatcattggggatgggggccactgtcaggatgggagtctcg

SEQ ID NO: 1647 - DNA, 111 bp, Homo sapiens
gcgtcacagtgaaaggcacccgtgatgagacagctcgctctcggcagtttcaggaccctccttgccctggctgctcatggggaacatttgaaatgcatgtgggggcctccg

SEQ ID NO: 1648 - DNA, 62 bp, Homo sapiens
gcgtggtgcggaggcctcaggaaacttacatcatggcagaaggcggaggggaagcaagcacg

SEQ ID NO: 1649 - DNA, 39 bp, Homo sapiens
ccgcgaacgcccagccgcgcctgcgagccgtaagggtcg

SEQ ID NO: 1650 - DNA, 89 bp, Homo sapiens
tcgctatcccattaactcctacaccaaccatcctctccctggggagcctcccctgtcctcccaggctcctgaggaggccgctgcatgcg

SEQ ID NO: 1651 - DNA, 150 bp, Homo sapiens
tcgcaggcgggggactcgttcacgtgtgcctttggatttgcttcagaacctctgatagagcccaggtcccggggctcatggtggcctggacttccaggttgtgatgccaggagggtcccagccgggaagccccgagcagggctcaggccg

SEQ ID NO: 1652 - DNA, 290 bp, Homo sapiens
tcggtttccccgcttgtgaaacattttcattatgaccgtctgttaataacatgccacatgtttccaagaaagctcctacgataattgagtggttattctcctgggacgtttcagctattattgctctgactgttgagagtttaaaattcaaagttacacagaagttaaaaatagtttttaagtctgacagatctcatccagggtgtcagctagttctgttggtgtgggcagacagcctgtggtgcctgccaccgccgtaacagcactaacagtcttggataatatgaacg

SEQ ID NO: 1653 - DNA, 99 bp, Homo sapiens
ccgaaggagtgccgggcgccacagagcccagggccagaccgaaaaagttaaggggcttttgttctgactctgctcgcagatggtgcaatttgccttccg

SEQ ID NO: 1654 - DNA, 92 bp, Homo sapiens
acgtgcccatgcctcagctcccgcagggcctcgtcctgcctccgactgcctcccggggccccacggggatctcggtcccccgcatgtggccg

SEQ ID NO: 1655 - DNA, 92 bp, Homo sapiens
gcgggaagccgaccacgtttgctctttgctgacttttgttaacaggtgtcagttggtgtgacactgtcttccctattcccatcctcggcacg

SEQ ID NO: 1656 - DNA, 33 bp, Homo sapiens
tcgccatgagggtcggggcgagcagtgctgacg

SEQ ID NO: 1657 - DNA, 79 bp, Homo sapiens
gcggtctccggcgctcagacctcagcctgcctctccgccccgcccctcttggggggcatcccttctgtgcacgcccacg

SEQ ID NO: 1658 - DNA, 174 bp, Homo sapiens
tcgtggagtctgagttgctgaccttggccccattagcaccgttctctaaccagctcaggcacggggctgtaatgaggattattgaagtaacatatggaaaactcttagagttagctcttgggaaaggaaaaaggcactaaataaatacaaggaattattaaaaaccgggagacg

SEQ ID NO: 1659 - DNA, 68 bp, Homo sapiens
tcggcaaagtattcaggttagaacgcattccagtctccttgagacgccaggcgtcatggagaggctcg

SEQ ID NO: 1660 - DNA, 168 bp, Homo sapiens
gcgttcagacttgtcatggatgactctaacagggcaggtgttaccacgtcaactggtccaaaaaacaaaataccgggtgcacatcccttgaagtttcgggtgtgtttactctgaggcaccgtgcactgcaaagctggggattcacaggcaagtttaggtgaatcctcg

SEQ ID NO: 1661 - DNA, 204 bp, Homo sapiens
acgttgacatgggtagtgtcatcacgcctttgcagaggaagtgatgctcgagtgttttgatgtatttttccttaaataccgcttcctctgaagccttggaacggcgcgttacacagatctcatctgcctgctccatccacgccaactccttcctttccgactcatccttcctgaggccccgcagtcctgcacacggtggtgacg

SEQ ID NO: 1662 - DNA, 13 bp, Homo sapiens
gcgtggaatctcg

SEQ ID NO: 1663 - DNA, 98 bp, Homo sapiens
tcgctggatcagcaaagcagcggacaccctgccggatctggaggggtggaagtcggtggcgggtctgtgacagtggcaaacagcagtggtgaaaagcg

SEQ ID NO: 1664 - DNA, 69 bp, Homo sapiens
acgacatccacgggctccgcaatgtcattgatgacactgtcactcggctgcagctggagacagagatcg

SEQ ID NO: 1665 - DNA, 37 bp, Homo sapiens
gcgggggcggaataagcgagctggggaggcggccgcg

SEQ ID NO: 1666 - DNA, 73 bp, Homo sapiens
gcggaggcccgaattcaagaggctcagaaccacggaaagcagggcgggtttgctcctggtgtcgtggctgacg

SEQ ID NO: 1667 - DNA, 56 bp, Homo sapiens
ccgcccgcgcgcgctctctctccactcacagcctacttctgcttggcggcgcctcg

SEQ ID NO: 1668 - DNA, 313 bp, Homo sapiens
acgtgtgagttgctctgccactaactggctgtgtgaccttcacagtcactttccctctctgagcctcatttgcctatgtaagatgaagattctaaaattatatggggctacggaattctattatcttaggactccagctacccttgaaaatagccattgcccagttgatacagcacctccttcctgccctcctttctgccccacctcctgccttctgccccggctggcccatatctgttgcaatggagcactttaatttcctcctttggtttcataattcaaggacagcaccatctgccacattaaatccacg

SEQ ID NO: 1669 - DNA, 72 bp, Homo sapiens
ccgccatctactcacgcaaccaggcaggaaatgacagaggcatcttctgctcccgccctgcctccctccccg

SEQ ID NO: 1670 - DNA, 115 bp, Homo sapiens
gcgctactcagggggttaagcaaaaaatcagagggtcggaaatcagttttcaactacaagagtcttgcggatctggagcagcggtggatacacctctgcctgcgcggagggagcg

SEQ ID NO: 1671 - DNA, 47 bp, Homo sapiens
gcgcccgtcacgacgcccggctaatttttgtatttttagtagagacg

SEQ ID NO: 1672 - DNA, 305 bp, Homo sapiens
ccgaggcaggcgagtctggatgaatgtacacacggggtggcacaggcgagtcagcattacctgccaccatccatttcgaactgtggtaaacatacctagaaggcaatgaccaggcgttcagtatactgtttttatcttggcatgtccaactcagtagaatcagacaaaatgtgtgcctattttgtttcagttttaaaataaatcaatttcctctttacactaaaaataaaatttcaagcgcttttccaaaccactctgaggcagcagtggcctactgacaattcagactaaggggcgtgttaacg

SEQ ID NO: 1673 - DNA, 107 bp, Homo sapiens
gcgagaatgcccgctttagattttactgctccagggccgacttccaagcgcccattttatcacctccagctcccgctctgcccacacaggcacagcctgcaccaccg

SEQ ID NO: 1674 - DNA, 33 bp, Homo sapiens
acggcctgtgcgccccaggccccggatgccccg

SEQ ID NO: 1675 - DNA, 174 bp, Homo sapiens
gcgtctctccagccagcaggacagctctgccggaagccccatccctcctcctccccatcctgtccctgagccgtcagccctggtggccgctttgaggtgtgggcgggttctcctctcctccgcagacccctctttagctgcctgtctgggccagcacaggatgtgggcgccccg

SEQ ID NO: 1676 - DNA, 47 bp, Homo sapiens
ccgtgccctcagggacgcccccaggtcggtgcggcctgtgcggctcg

SEQ ID NO: 1677 - DNA, 113 bp, Homo sapiens
ccgacagcaaaaaaccctaatcttcattgactgaataaaaaagattcacgggacatccggtccagacagaaaagggtgcagattcatgttccctgctcctcctgcaaagctcg

SEQ ID NO: 1678 - DNA, 46 bp, Homo sapiens
acggctctgcccactgacgccggcaccatctcctcgctgccacccg

SEQ ID NO: 1679 - DNA, 58 bp, Homo sapiens
ccgccagctccctgccacgcatgaactcggatacatctgttgacaccccggtcccccg

SEQ ID NO: 1680 - DNA, 180 bp, Homo sapiens
ccgagcagggctgggggaggaaccccaggctgcgtcccagattctccccggtacccaaagtgttgcctgctctctctgacgtcacttcacttttgtccacaaacaatgttgacctctctcgcgtgcacacacccggggagggaagaaactggactgagaccatctctcctgtttttggcg

SEQ ID NO: 1681 - DNA, 39 bp, Homo sapiens
ccgccaggagacgctgccctgtggggcacggcttgcgcg

SEQ ID NO: 1682 - DNA, 37 bp, Homo sapiens
ccgagaacaaagctcgctttagcttctgcgtacaccg

SEQ ID NO: 1683 - DNA, 59 bp, Homo sapiens
ccgcggcggcggggaccaaaacgccgcggcggcggaggcaaaaagctgcaaaagccgcg

SEQ ID NO: 1684 - DNA, 65 bp, Homo sapiens
ccgtgtccgaggcggtggccgaagaagtatctcttttcagcatgacggacatgattctgttttcg

SEQ ID NO: 1685 - DNA, 38 bp, Homo sapiens
gcgcagcacagccgcatcctctctgcacaaaaagagcg

SEQ ID NO: 1686 - DNA, 51 bp, Homo sapiens
ccgctgcttcccgttctgtaacgatcgctcgctaggggcggggcgcgtccg

SEQ ID NO: 1687 - DNA, 30 bp, Homo sapiens
gcgggtgagtaacccacgccggtgccgtcg

SEQ ID NO: 1688 - DNA, 91 bp, Homo sapiens
gcgacacaaacaggaagctggcgacagggtggggcctgcgcgggcctggaggagccggcagcagggctgcgggggagctgggatgcacccg

SEQ ID NO: 1689 - DNA, 84 bp, Homo sapiens
gcgggcgcgcgctgccgctgttcacacacaggcttcctcctagtgctcttaaaaagaagagagcttcaccaacatgttcccacg

SEQ ID NO: 1690 - DNA, 15 bp, Homo sapiens
acgcaccgcgtggcg

SEQ ID NO: 1691 - DNA, 224 bp, Homo sapiens
acgataaaagtgaatgccggttcacggtgactcatcgggaaacacagtcttgctgagacatacttatttcctccccagtttatttccagccatgtaaatttatccacggagttttacagataaataatttggatgccaaacagccaaaaactgtgactattttgagccttctatttaacatgtacactaaaaatactttgttagaattatagcacttgtctccg

SEQ ID NO: 1692 - DNA, 27 bp, Homo sapiens
gcgctgagcgtccgttatgtggtggcg

SEQ ID NO: 1693 - DNA, 53 bp, Homo sapiens
ccgcgggggtggatggccgccagggagattggggcggtctgcaggcccgggcg

SEQ ID NO: 1694 - DNA, 100 bp, Homo sapiens
gcgattgggagacatccacagtcagtacttgtttatttgtccagctttacaccatgtaagtgatgcggaatcctttccgcctctaataataacaccaccg

SEQ ID NO: 1695 - DNA, 97 bp, Homo sapiens
acgtgggcaagaagggatattacaggagtcatctcatttaataatcctacagtcccccaacaaccactgagggacaaccccactaaggaagagggcg

SEQ ID NO: 1696 - DNA, 122 bp, Homo sapiens
gcgtgttggtgaggacattgcgcaactgcttcagctccgtctgcagctctagcaccttccgcacgtagtactgctccttggaggccgactcctggatcaggctctcctcccggctctctccg

SEQ ID NO: 1697 - DNA, 102 bp, Homo sapiens
tcgaagtggcgtcctgaaagccgggggccttgcccggaacagggaggcttgggctgcggccaggggaggcaccagcagctggagcacactagaccagagccg

SEQ ID NO: 1698 - DNA, 763 bp, Homo sapiens
acgcagaggcctcccggctgtgcccgctggaagctgcgggggaagaggaggtcgacagtgagtgggccatgacccgtccgtagacggctgcgggagggttgcaagggccaagctcccagagtgacttcaaggcaggaatggctctgctcccaggtgtcccccaccccctcctctttctccagctgcccaagacctccaggccccactcccctggtcccttcctgtctcctcactctggctgttccccagctgcctggcaccctccagcaaaccctcctccgcgggcgcacccagaggatggcccagctggcggagccacccagcacacaaaaagtctgcctttctttgaccttaggtttccccaccacctgccggatcagggcccgtggggcgggggccgctgcctttgtcaccccagctctaactctcctgcctccctggcccctgccaccccctccacacaccaatccgcacagacgagacactcgaccctcactcacctcgtcctctctcagagccctcccggttcttgcgggtctccatcttcccctgctttccacagggaggtctgtcttctcccgtctcctcaaaggacagcttccccatccaggaaagagctctgtgttcccggcgaggaggctctaccctctggcagcctgagcagcgcaagcggggcaatggccggttgggcgcagccggcgggctttgatagggagccaggaccccctgctgggagttcccaggaggattggctgcggacacg

SEQ ID NO: 1699 - DNA, 729 bp, Homo sapiens
ccgtggggcgggggccgctgcctttgtcaccccagctctaactctcctgcctccctggcccctgccaccccctccacacaccaatccgcacagacgagacactcgaccctcactcacctcgtcctctctcagagccctcccggttcttgcgggtctccatcttcccctgctttccacagggaggtctgtcttctcccgtctcctcaaaggacagcttccccatccaggaaagagctctgtgttcccggcgaggaggctctaccctctggcagcctgagcagcgcaagcggggcaatggccggttgggcgcagccggcgggctttgatagggagccaggaccccctgctgggagttcccaggaggattggctgcggacacgcccacaggggcaggctaccttgattaggttaggcgggttggaggggttccgctttctccctgggtccctgccgctctgtctccggcaagtgatgagcaattttgcggagtggcagaacagagacaaaggtagctgtgggcttcacggtaatttcaaaggaagtgccctacttcgttgcccatttcgaaggcctctctacctctgcgttggacgatttctccacttcctggtgtgcacctgcgtgtgtgcgtgcctgtgtgtgtgtgtgtgtgtgtgtgcgcgcgcgcgcgtgctggggtgtgtgcacactatgccgagagtcgggcaaatttcgagtgaagggagaccg

SEQ ID NO: 1700 - DNA, 37 bp, Homo sapiens
gcggaagggggttgggtaaggagcccttcgtgtctcg

SEQ ID NO: 1701 - DNA, 651 bp, Homo sapiens
ccgcacagacgagacactcgaccctcactcacctcgtcctctctcagagccctcccggttcttgcgggtctccatcttcccctgctttccacagggaggtctgtcttctcccgtctcctcaaaggacagcttccccatccaggaaagagctctgtgttcccggcgaggaggctctaccctctggcagcctgagcagcgcaagcggggcaatggccggttgggcgcagccggcgggctttgatagggagccaggaccccctgctgggagttcccaggaggattggctgcggacacgcccacaggggcaggctaccttgattaggttaggcgggttggaggggttccgctttctccctgggtccctgccgctctgtctccggcaagtgatgagcaattttgcggagtggcagaacagagacaaaggtagctgtgggcttcacggtaatttcaaaggaagtgccctacttcgttgcccatttcgaaggcctctctacctctgcgttggacgatttctccacttcctggtgtgcacctgcgtgtgtgcgtgcctgtgtgtgtgtgtgtgtgtgtgtgcgcgcgcgcgcgtgctggggtgtgtgcacactatgccgagagtcgggcaaatttcgagtgaagggagaccgagtcccg

SEQ ID NO: 1702 - DNA, 764 bp, Homo sapiens
acggctgcgggagggttgcaagggccaagctcccagagtgacttcaaggcaggaatggctctgctcccaggtgtcccccaccccctcctctttctccagctgcccaagacctccaggccccactcccctggtcccttcctgtctcctcactctggctgttccccagctgcctggcaccctccagcaaaccctcctccgcgggcgcacccagaggatggcccagctggcggagccacccagcacacaaaaagtctgcctttctttgaccttaggtttccccaccacctgccggatcagggcccgtggggcgggggccgctgcctttgtcaccccagctctaactctcctgcctccctggcccctgccaccccctccacacaccaatccgcacagacgagacactcgaccctcactcacctcgtcctctctcagagccctcccggttcttgcgggtctccatcttcccctgctttccacagggaggtctgtcttctcccgtctcctcaaaggacagcttccccatccaggaaagagctctgtgttcccggcgaggaggctctaccctctggcagcctgagcagcgcaagcggggcaatggccggttgggcgcagccggcgggctttgatagggagccaggaccccctgctgggagttcccaggaggattggctgcggacacgcccacaggggcaggctaccttgattaggttaggcgggttggaggggttccgctttctccctgggtccctgccgctctgtctccg

SEQ ID NO: 1703 - DNA, 102 bp, Homo sapiens
ccgcttgggtttccggttataggagcatggtgatttttcaggtgatactcatttagattacaacttgatagcggcttcttctgaaaccaggtgaagaattcg

SEQ ID NO: 1704 - DNA, 55 bp, Homo sapiens
gcggtcacatggagctggcagggtgccacccacatgcgcctctggcacacggccg

SEQ ID NO: 1705 - DNA, 17 bp, Homo sapiens
gcgccaggcgcgtgccg

SEQ ID NO: 1706 - DNA, 170 bp, Homo sapiens
tcggattgaggaaatgaggccggggtccttgtcctcttccaagaagctcttggctttggccaatggcagccgccttgtggtcacaggtgtctggttgagggtgggggaccgggcggctctgggaaaggggaactgggccgccgggccagcatgagcaccacttgcttgcg

SEQ ID NO: 1707 - DNA, 22 bp, Homo sapiens
ccggtgccttgggttctaggcg

SEQ ID NO: 1708 - DNA, 64 bp, Homo sapiens
tcgcttcctgttttcaggaggaaatgctcctggagctggggagggctgtgctgccgggcgggcg

SEQ ID NO: 1709 - DNA, 231 bp, Homo sapiens
acgcgttctgggtgacttgacgttttaataaacatgtgattcccacacatgggaatgctcaggcctggaactgacccacagggatgcgtcctcacagcctgggggagccacgaggatttggctctgattctcatcttccccctcttcatcccttgccctcccactcctccatgacgtggtggccacagctcctgccgggcagtgaggccgactgcagctgaccggtgaccg

SEQ ID NO: 1710 - DNA, 236 bp, Homo sapiens
tcgagcccttctcttctgcaccccggtcagctcctactcaggacctggcatctcctaaaagagaaaaaatgttgcccctcattatgcccttgctgaagttctagccacacacaaaacagcaaatccgttcagagcagaggaattttctttagagattcttccaaaagctcaacagcaacgaacaacaaaatcttgcagtgaaagttaaaaacattagggagtcacaggcgctctcg

SEQ ID NO: 1711 - DNA, 54 bp, Homo sapiens
gcgtgggggtagctggtgttgtagcgcatgtttgaggacgtggatgtggcaacg

SEQ ID NO: 1712 - DNA, 75 bp, Homo sapiens
gcggggccggctacagcgggggtggcagacagcgagtgggagcagcagggctcagtgaggactgagccaccaccg

SEQ ID NO: 1713 - DNA, 74 bp, Homo sapiens
ccggctaggagggcacgtgcccaagctaggtgccagggccccacccctcacacagtgctgcggccccgccggcg

SEQ ID NO: 1714 - DNA, 60 bp, Homo sapiens
ccgcagcgcagagcagtcccggcgccgctgcctaggtgggccggggaaggcgcgccaccg

SEQ ID NO: 1715 - DNA, 81 bp, Homo sapiens
gcgtgaatcacagtgacagcaatgcgccctcaccacttcccgttgtcctacattggcttggtctgggctcgtattcctccg

SEQ ID NO: 1716 - DNA, 144 bp, Homo sapiens
acgttttttgtgaaaccgctgctgctgcgaggggcccctcaaatcacgaataaagcagaggctattaaccagggtgtgaacactgccctgcgcatgctctgtgagtgagccccacacacgcacagggtgggcactcacaacacg

SEQ ID NO: 1717 - DNA, 280 bp, Homo sapiens
tcgatggtttcagagtcagagaatgtaaacataggacccacaaacgttttacaggagcacggctgtggctactgcagggactcctgaaccgtgacgcacagtcagttggccgcagagaccagcctggagctcgccctaaaacctctttgcagccttgcagatgtcatagttgtcccaaagctgggcctcatgcttccgtgtagcctcactgaatcaggagaccgagtgtttccagagccaggatgtgggcgctgtggggccagtgctgcatcctcctgcg

SEQ ID NO: 1718 - DNA, 18 bp, Homo sapiens
acgatcgcgtttagcacg

SEQ ID NO: 1719 - DNA, 51 bp, Homo sapiens
tcgcagaagagagaggtgacaggaggaaacgcggggcgggtggctgccacg

SEQ ID NO: 1720 - DNA, 91 bp, Homo sapiens
ccgatcccgcgttgctctctgcagttctgcgacatgcttcccctccagtccccctgggggcaggtggtggctccgtgtcccctgctagacg

SEQ ID NO: 1721 - DNA, 36 bp, Homo sapiens
acgtgtatgtgcgtcacccccacgctgcccggcccg

SEQ ID NO: 1722 - DNA, 41 bp, Homo sapiens
gcgtgtagacggtaatggatggatggcggatttgcacagcg

SEQ ID NO: 1723 - DNA, 51 bp, Homo sapiens
ccgtgacaaggggcaggactgctgaggttgctcgctcgccctcagccagcg

SEQ ID NO: 1724 - DNA, 58 bp, Homo sapiens
gcgcgcactcgcgcatgtgtgtgtgtggtagacattgcctgatagattgcatcttacg

SEQ ID NO: 1725 - DNA, 18 bp, Homo sapiens
gcgcctgcctggggcccg

SEQ ID NO: 1726 - DNA, 86 bp, Homo sapiens
ccggcgggcctagtccagacttcccgggtcagccttagaagccacagtgtttgcctcctactcagcactgttagggatccaccccg

SEQ ID NO: 1727 - DNA, 3 bp, Homo sapiens
gcg

SEQ ID NO: 1728 - DNA, 52 bp, Homo sapiens
gcgacgaaacaattgtagtgtttggtatactgctatgtgtgtaatacgcacg

SEQ ID NO: 1729 - DNA, 34 bp, Homo sapiens
gcgatttcacggtgtgtgtgtgcgtgtgcgctcg

SEQ ID NO: 1730 - DNA, 230 bp, Homo sapiens
tcggcgacattttcaaacacgatgagctgtttgtcaactatgtgttctggagcagaggatgggggaagggtttggaaaggtgccagcagcctccagcagggctgctcatctgcagtctgcagatggaggcaattatcctaggcggggcctctcggagacccccagctatgcttatgtctctggagccatgtgcgttcagatgcttgcatttcctgtgcacagtaacaccg

SEQ ID NO: 1731 - DNA, 85 bp, Homo sapiens
gcgcagaacggatgctcaggaatccagctctggagtgagtcctgagatgcggaaagccggtgggacgtggcaagggtgcacctcg

SEQ ID NO: 1732 - DNA, 83 bp, Homo sapiens
acgccctgcctcgtgctcccgcggactggctgcgccccagactcgggtttcagtagaatcaggatgagcctgctgggcagccg

SEQ ID NO: 1733 - DNA, 33 bp, Homo sapiens
gcgaggttgcctgccccgtcttgtacccggccg

SEQ ID NO: 1734 - DNA, 91 bp, Homo sapiens
gcgcagaggctccgccaccggcgtgctcctggcctcagccctccctgttctgaaaccgcctttgctaagacggtagtagtgaggaatcacg

SEQ ID NO: 1735 - DNA, 75 bp, Homo sapiens
gcgcgcggcgcggggctgcccccaggcgtgacctcacccgtgctctctccctgcagaatctcctacgacccggcg

SEQ ID NO: 1736 - DNA, 125 bp, Homo sapiens
tcgctttgtctcccaggctagagtgcagtggcgcaatcttggctcactgcagcctctgtctcccaagttcaagcaattctcctgtctcagctcctgagtatctgggactacagccacacgccacg

SEQ ID NO: 1737 - DNA, 19 bp, Homo sapiens
ccgaggcgggccgatcacg

SEQ ID NO: 1738 - DNA, 155 bp, Homo sapiens
tcggtgtcacgcgcatccgtgtgaagacaccgccaaacagggtgtgagcaataaggctgtttattttaactgggtgcaggcgggctgagtccgaaaagagagtcagcaaagggagataggggtggggctgttttataggatttggatgggtagcg

SEQ ID NO: 1739 - DNA, 199 bp, Homo sapiens
acgaagatcacaacaatgaccaccatggcaccggcgatgatggcaatcatgatggttagatagtcctcattttgatagggttggctactatcccctatgttcctgtccaacggggtctccatagtcctgcggatcaagtcatagatataggaggcatttccagcagtgtcgttaacataaaggaatacaagcacaagcg

SEQ ID NO: 1740 - DNA, 48 bp, Homo sapiens
gcggtcgttggagtgagagttcgctgcctactttttggtagctcttcg

SEQ ID NO: 1741 - DNA, 22 bp, Homo sapiens
ccgtgccggaattgaatgtgcg

SEQ ID NO: 1742 - DNA, 313 bp, Homo sapiens
tcgtcttcatgtcttgggagttgctgtttctgtctttaaatccgagcgtcagaaggatctgagacacccgatataaatccctggcttgttaatgatgctcacagagagcggccacgcccatagactgcataatttatctccatcctgcagaattctgattttcatgtaaacctaggacatgttcagagacttggaagttagcgattctagcccctgccttaggcatgcccgtgtggttgtttctgctttggattggctggtggtagcagctgctggcatcacgcaattggcttggctgcagagtgagcccacg

SEQ ID NO: 1743 - DNA, 425 bp, Homo sapiens
cgtccccgtgcttacggtccccgatgaggcgtgacggcgcgtccccgtgcttacggtccccgatgaggcgtgacggcgcgtccccgtgcttacggtccccgatgaggcgtgacggcgcgtccccgtgcttacggtccccgatgaggcgtgacggcgcgtccctgtgcttacggtccccgatgaggggtgacagtgggtccctgtgtgttcggtccccgcttaggggtgacggcgtgtccccgtgcttacggtccccgctgaggcgtaacagggcgtcccctcgcgtacggtccctgctgaggcgtgacagtgggtccctgtgtgttcggtccccgctgaggcgtgatggcgcactcgccgatatgagacgaggcagcgtaaaactcccagggcactcaagtcacagaaacgtggcgtgaggaaga

SEQ ID NO: 1744 - DNA, 212 bp, Homo sapiens
ccggtcttcatagccgtcaataaatgcagctctgcccggaaacttacccgggtgcaggaaccagtggattgccaagtccacaggtggctgtggtcatccagtgctccccataagccgggtatcttggccagtttcttatcaaacagaaaaggctttgcacttccaccaactgcagcaggtactctttgaactggaatggtccggcgggaccg

SEQ ID NO: 1745 - DNA, 123 bp, Homo sapiens
ccgcatcactcccctcccaggcctcagcccctcttcccagcccacggtcctgggtgggcgtcttccgcatgggaggccgtgggcgctgggttttcacgaccctgaaacttgagcctgccctcg

SEQ ID NO: 1746 - DNA, 72 bp, Homo sapiens
gcgcgatgcccgagtcgctgctccacgatgggggagggaaacacacggtttcgacccaggtcctcagagacg

SEQ ID NO: 1747 - DNA, 59 bp, Homo sapiens
ccgcccaccgacagacccactccgagccactccggggcctgccagcacaagcttttccg

SEQ ID NO: 1748 - DNA, 178 bp, Homo sapiens
acgtattacatattacatattatatattatatattacgtattacatattacatattatatattatatattacgtattacatattacatattatatattatatattacgtattacatattacatattatatattatatattacgtattacatattacatattatatattatatattacg

SEQ ID NO: 1749 - DNA, 243 bp, Homo sapiens
acgatcctgcagcaccgagtttgatgaatacttaggaaggcaaacaatcatgatcagtaatggaacagtcacttagggtacacctacttctttgtgagttgaataatctatttccacccaccccagccccacactgtcaaccaccatcaacaatccggggaatcaagttaatcttcaattaggtgaaagaatttcaggaacgagtgcagctcaagttaccaagtaacttactgttgtgaaacg

SEQ ID NO: 1750 - DNA, 137 bp, Homo sapiens
ccgtctgtgtcccctggccctcctggccttccccgggcgcagacgatttcattattgcagggccgcaccgtggacctggagtagggcactgcggggtcccgctgcgtcctacgggagcgctacctcggtctgctacg

SEQ ID NO: 1751 - DNA, 362 bp, Homo sapiens
tcggcttcattatgtaccaccgaatgtaatttatagctaggcggtctgtcggcggcgatttaaatcatttggtgataaggatcacacttattagatttcttcaaagccgatgggggttttctatctttttttttttttttttttttggagggcatttgtgctaaattgcccagtgctggtgtgataactgtcaaaagtttgacatcaaaggagctaatattattcagttaccagagaagctgtctgtctaaataagaatatcttaattactgcatcacaaaggtagaaaaggggtcggatctgaaaaggggagaggcattcagccgctgcttttgatgcgctatctatattagaccgatgcg

SEQ ID NO: 1752 - DNA, 93 bp, Homo sapiens
gcgggatgtgttttctgaaacttttacacaggaactccagggggcgggggacgagggcggcaaccccagatcacaggcggccggcgacctccg

SEQ ID NO: 1753 - DNA, 70 bp, Homo sapiens
ccgcgcagggaaaggctctgcccaagccttcagggaggcagcagcgcccggtgcacagttcctaagggcg

SEQ ID NO: 1754 - DNA, 88 bp, Homo sapiens
tcgctttcaggaggcggcagcttgactgccagcagccggccctgggactgactcagggctgacgggtgggtaattacctcccagctcg

SEQ ID NO: 1755 - DNA, 53 bp, Homo sapiens
ccggcctcgaaaggggcccacttaccgctccgcggttaataacaggcctcgcg

SEQ ID NO: 1756 - DNA, 34 bp, Homo sapiens
ccggccacgcatcacacgcacatacaccagcgcg

SEQ ID NO: 1757 - DNA, 187 bp, Homo sapiens
ccgcatccgccacatccagcctggtgccttcgacacgctcgaccgcctcctggagctcaagctgcaggacaacgagctgcgggcactgcccccgctgcgcctgccccgcctgctgctgctggacctcagccacaacagcctcctggccctggagcccggcatcctggacactgccaacgtggaggcg

SEQ ID NO: 1758 - DNA, 97 bp, Homo sapiens
acggtccccacggcatcacgggagggctccgtgacctcacagagtcgggggatcccgctgctccccctacgcaggcctgcactcacccatgcattcg

SEQ ID NO: 1759 - DNA, 37 bp, Homo sapiens
tcgtccctgggaacggaatgtctcggtgtaaggcccg

SEQ ID NO: 1760 - DNA, 126 bp, Homo sapiens
acgtccccgagcagggggcacactgagcccttcctgccccaaccacatctgtctcatcccatagccctgcacggccccacacttgccagatgtggccacccgtagggaccaagttcattttccgcg

SEQ ID NO: 1761 - DNA, 51 bp, Homo sapiens
tcggagggaaaggacagcagcgtggcagctttgctgcagaaggccgagccg

SEQ ID NO: 1762 - DNA, 103 bp, Homo sapiens
acggttgccacgggaaggaataggcaaggcaggctaaagaggtttacgattggcagcaggctctggggaaaggggctgtccccagccagcttcctggtacccg

SEQ ID NO: 1763 - DNA, 164 bp, Homo sapiens
acgacattcaacatcgtactccaaagggggttaggtttgtgtgctaggggtgaacgctgtgcaatttaattctgtttccaaaagatctttggaggataaaggatactttctgtcttttatttagggaaggcgatcatgttggcacagggcataagagagtagcg

SEQ ID NO: 1764 - DNA, 1513 bp, Homo sapiens
agttccgtctcatgcctacgtttcgggtaggatgctatttttaagtgactggcaccgtggatcagtacacttggagggaggagaggggatgccacacatagcaggggtgggtgctgcgagcaggggtggggagaggaaagggggctgcgttcgagccactctgacaatgaggctgagggctggctggctgtcacacccacggccgacattaatcacatcctgcctggcactccccagcagctctgacacatgtggccgcaccccacttctggaaagctccccgctcaggctctgcagagcgtttctcgcgacacttcccgtgctggatccgtgccgccagcatggattccttcagcctggctccggcctggggtgggctctgagccgccatgggactaggcagaacacgctgtgtgcaatgcaaggctgagcacgctgggccccttcgggatgctggcggttacatgggcagtgggacgggtggagtgacacggaacatgcctcagttgcttctccagctagggttttggggttgcaagcaagagaacctggctcttgctaaccatgttggggctggaggcaagggtttaccggtaggacctgagctagctacagagtggagaggtaagatgagagccagcccacaggaaggccggagtgaaacagcgttgggggcctgaaagatggggactaacaagcagcctctggctgggaggttcttccgggatcaatttgctccatgctacagaggggacttgctcagggcgacgtggctaattggaggcacggacaatctccgaactcagacctctgacggatgccgtcctctgaccagcctaaagctgccggggtcctcccagctcagggacgctgtcctcacaggaatgcctaatggggcttcctccctgcccatcccaacccctggggccacacattgcttattttggattacaccgggcagcctgtgccccggtcagaggcagggagagcttgggcaggactggggagtgtgactcatttctgtctacccagccaagcaccaaaggcgatgctggcaagcgggagacggtccacagccactcaccagcagccagaagccaggctcaggacagccaggcctcagcttacacagaggccaccaaagaatggcccggcaggatgccaaacctcatttatctgagcggagcaaggccgcctggtcagtgtccactccacacccaggccctcctctctttgctgcggccacagcagacacgccagctgccccatcgctgcacaatgccaagcctccgtccacctcgccctgaacgcccttcccccgtgtccctcctatctccgtgaacgtggcatgagagaattcacgctctgcagtcagaaatccaatgcctggtgtcacaacttcccagctatagatcttgggcgagttgcatcccttctctctgcctcagtttcctcctttgtaaaatggggataagaccttctttgcagggtttgacagccaggaatcaggtgt

SEQ ID NO: 1765 - DNA, 169 bp, Homo sapiens
acgccactgtccaggcaccaggcacgcaagtggacagaagactggccctgtgagactctcttctccgggctgagagacaatggccaagtctgtaaccagcagggaggatggtgagcagaaggacaaggacacgcagggggatggaaactggggccgccctgctgagacg

SEQ ID NO: 1766 - DNA, 31 bp, Homo sapiens
acgttccccaggacaagccgccagcatcccg

SEQ ID NO: 1767 - DNA, 52 bp, Homo sapiens
tcgaatctggctaaaacgctcacgcatcctcagtcctcaaaccggaactccg

SEQ ID NO: 1768 - DNA, 85 bp, Homo sapiens
tcgaaactttccgcagcttctggtagatgaggaatgtgactacgtagcgcctaccgccccaaatgctattataaattccaagtcg

SEQ ID NO: 1769 - DNA, 39 bp, Homo sapiens
ccgcacggcgggggaggaggtgcccagctggccagggcg

SEQ ID NO: 1770 - DNA, 124 bp, Homo sapiens
ccgttggttgccaggaaaagagctgctgcctcgtttcctgctccagctgcccgctgtagtaaacagtttcctaaaagaaaatgggcattgctgattcttctgtttgcatcaaaatgcggtcacg

SEQ ID NO: 1771 - DNA, 57 bp, Homo sapiens
gcgggccagcgcgaattccgggtgggcgtgggctcggcgggccccgcacgctgagcg

SEQ ID NO: 1772 - DNA, 47 bp, Homo sapiens
ccgagctgcgccggctgcagagcctccctaagtgtgagcggctcccg

SEQ ID NO: 1773 - DNA, 90 bp, Homo sapiens
ccgaagcctcgggttccaggaagctgtgttgagagtgccgactgccgttctgtgcctgctgcttctcggtgaattccaggcgggctgccg

SEQ ID NO: 1774 - DNA, 40 bp, Homo sapiens
ccgcagagtgctgggattacaggcgtgagccaccgcgccg

SEQ ID NO: 1775 - DNA, 60 bp, Homo sapiens
gcgggaaagtctgaatggggttggggggtagtttacgatcttctctctttggcgtctgcg

SEQ ID NO: 1776 - DNA, 180 bp, Homo sapiens
tcgttttttaattaggaaaagctccctaatgaggctcttttgccagctaataggactctcgatttccatgagaaccattcttgcccagaggattaggggagctgttgctcaccacaccaggatcttcccccagcgtccaatttaatttgcaaatacgtaatgcagattccctgggtgccg

SEQ ID NO: 1777 - DNA, 212 bp, Homo sapiens
acggtcctgagtgccgggtgcggcccagggccccttactcagtgccatcgggattagagctaatgagttggaaggagttaacaatgcttcgggccagcggaggcccaggagacctctcaggccccgcgctgtggccgcctttcaccactgaggtgtaatccgctttgaaatcaaaggtggtacaaagtatgaatttaaatttgacatttacg

SEQ ID NO: 1778 - DNA, 159 bp, Homo sapiens
tcgccgttcgccttcgggcctcagttttcccatctctaaaatgggaacttgcataaaatcacatgtaaggcttccattcttacactcagtgctggaattaggacagcccttcgttctgtggggttgattctaagatttgacccttgcttcagtcctgcg

SEQ ID NO: 1779 - DNA, 79 bp, Homo sapiens
acgccagcctggccatggtcaccgctctgtccccgaccccaaacccgtgacaacgtccgaggctccttggaggaaaacg

SEQ ID NO: 1780 - DNA, 57 bp, Homo sapiens
acgtgtctgcagcgcctggggaccggagctgtccttcccctgtgcgggcgggcaccg

SEQ ID NO: 1781 - DNA, 11 bp, Homo sapiens
gcgccacgtcg

SEQ ID NO: 1782 - DNA, 471 bp, Homo sapiens
acgttggatgttctgtggatggtgaagcgcttgctggctggaaccttcttcttgcatctatgaagaaggtgatgagaaagattaatgaatgattgattcgtgctctgaaaaatgttgtcttaacgctaagttaataacagcaacaactgctctgtaatagtggaatcttcatcaatgagatttcgaccttctgctcctctcaaaatcacattaagcatgcctcaagtaaaggaaagctaccacagggaaataagactacagaaagtgggaagattctaaagcaaaaaaataaaagtactgtacccaccaggaaactaaataaaatacaggaaaaagttgctttgggccaacacaggaaagagcaaattaaagcagatgtggctgagtgataaaacgggcaggcaggaagtcaacgtaagcaaagctagaagatgcgcaaacacagggagagaaaacagaagcagaggcgcg

SEQ ID NO: 1783 - DNA, 37 bp, Homo sapiens
gcgccgggagggcccagcttccccgtgcccggccgcg

SEQ ID NO: 1784 - DNA, 51 bp, Homo sapiens
acggctcactgtagcctccacctcccaagctcaagcgatcctcccgcctcg

SEQ ID NO: 1785 - DNA, 61 bp, Homo sapiens
ccgtccagaaggagtttaatgaggaggtgaacatgagcactcctcacagcgaacgtgcccg

SEQ ID NO: 1786 - DNA, 97 bp, Homo sapiens
ccgatcgggggggtaagacaaaggggtccttggatgggggcacctgtgagcagggacccctttgtctgagctccccgggtcccgagctggacgcacg

SEQ ID NO: 1787 - DNA, 44 bp, Homo sapiens
gcgggttagagggctgtgccggggccggtggagccatgcgagcg

SEQ ID NO: 1788 - DNA, 94 bp, Homo sapiens
gcgcgttacagaccaccgaccgcccgagggtgaattacatcttaataaagctactgtgagagaaccacgtggctaggttaaacttgggcaggcg

SEQ ID NO: 1789 - DNA, 51 bp, Homo sapiens
tcgccattgctgtgagctttgtatgccgtcacgtgcacaaggacgtttgcg

SEQ ID NO: 1790 - DNA, 62 bp, Homo sapiens
ccgatgccctgagatgcaggaccagctgcagctgcccagctgtctcccggggccgcggcacg

SEQ ID NO: 1791 - DNA, 42 bp, Homo sapiens
ccgctcctgttgcccaggctggtgtgtagtggcgcgatctcg

SEQ ID NO: 1792 - DNA, 109 bp, Homo sapiens
acggcccaggacgggctgtccggtggagtcagccctaggacccctgaaggatgcataaagacagagccggctcgccagcacgctcctgccagcaccgggacccactgcg

SEQ ID NO: 1793 - DNA, 123 bp, Homo sapiens
acggagtcgctctgttgaccaggctggagtgcagtgacgcgatctcggctgactgaaagctccgcctcccgagttcacgccattctcctgcttcagtcccctaagtagctgggactacaggcg

SEQ ID NO: 1794 - DNA, 31 bp, Homo sapiens
tcgcggcaggcagggcatcagggcgggcacg

SEQ ID NO: 1795 - DNA, 53 bp, Homo sapiens
gcgccagtgccgggcgctgctggagatggggcacccggacaggtgggcgggcg

SEQ ID NO: 1796 - DNA, 36 bp, Homo sapiens
acgtgtgtgtgccccgacggctttctgctcgactcg

SEQ ID NO: 1797 - DNA, 60 bp, Homo sapiens
gcgcgctgcggggtgggagcacctccaagggtggggaccatgcctgtctcgctgtggccg

SEQ ID NO: 1798 - DNA, 75 bp, Homo sapiens
gcggacttgattgagagcgccgatgctgcggtaggaagcgttgagcaggacgccgctgcgcaggagcacggcgcg

SEQ ID NO: 1799 - DNA, 80 bp, Homo sapiens
tcgtcgtgggcggtgatggtgagaggctggtttggatgactcaccacttggttgatctgggttggacctgaaggaaaacg

SEQ ID NO: 1800 - DNA, 26 bp, Homo sapiens
gcggcttccctgcggctccgtgcccg

SEQ ID NO: 1801 - DNA, 76 bp, Homo sapiens
gcgaccatcctggcttacacgatgaaaccccgtctccactaaaaatacaaaaattagccgggcgtggtggcgggcg

SEQ ID NO: 1802 - DNA, 88 bp, Homo sapiens
gcgagaagggtgctctagcctcccctttcttcctgcaagcagatgaaaccccacgtgaaacacgccctcctcgtagaggaagaggacg

SEQ ID NO: 1803 - DNA, 164 bp, Homo sapiens
gcgtggtgctctcccagcttcaaggaatatttttatctgggcaacacccagcaaagcggtgccacgacccagttcagtcatagctgcgctctgacttacacagcatgaaaatgctgcaatgttcattttctgagctctttttaacatgctaaatatgaatgtcg

SEQ ID NO: 1804 - DNA, 51 bp, Homo sapiens
tcgggctggaagggcgactggctccaatcttctctacccccccggctcacg

SEQ ID NO: 1805 - DNA, 21 bp, Homo sapiens
acggtgaacccgcccgccacg

SEQ ID NO: 1806 - DNA, 82 bp, Homo sapiens
ccgctgcacagacacgtacaggcggatgcacacgcgtgcccacatgctctctccacacgtgtgcctattcttagaatgttcg

SEQ ID NO: 1807 - DNA, 98 bp, Homo sapiens
gcgatgtgggctgtgtggcagtcgatgaccggggagtagccggcgctaatctgccccgggtggttcaggatgatgacctgcgagcggagccacaggcg

SEQ ID NO: 1808 - DNA, 233 bp, Homo sapiens
ccggagagggggacgtggcaggataatacgataatagtggagagaaggtcagaaggtaaacacgtgaacaaatgtctctgcatcataaacaaggtaaagaaaaaactgctgtgcttttgatatgcatatacataaacatctcaatgccttaaggagcagtattgctgccatcatgtcccacctccagccctaaggcagttttcccctatctcagtagatggaatatacaatcg

SEQ ID NO: 1809 - DNA, 102 bp, Homo sapiens
ccgcctaaactgtggagacagaggaaggatcagtgcttgccaagggctgggggaggaggaacaggcagagcgcagagggtttcagggcagtgccgctctgcg

SEQ ID NO: 1810 - DNA, 116 bp, Homo sapiens
acggcagacagcccagagcttctagcagctcatttctgtgaagcctccagaatccggcctcagcccccaaacccgcaggcgttgcgccaccgtcacggggaaggcgagtgacagcg

SEQ ID NO: 1811 - DNA, 106 bp, Homo sapiens
ccgggaggagcccatcctggggcaccggccgaggggggagcagccctgctgggggcctataaatacatctcctcaggccactagagtcgcccctggaggtcccgcg

SEQ ID NO: 1812 - DNA, 70 bp, Homo sapiens
gcgaaagcggggcagtatctgggctcaccggcgcgtagggtccttgccgcggcaagcgcagcagcagccg

SEQ ID NO: 1813 - DNA, 19 bp, Homo sapiens
ccgggcgcggtggctcacg

SEQ ID NO: 1814 - DNA, 57 bp, Homo sapiens
ccggtgctggaaatggagactgtttgactccgaagccatgctcctccgatttcaccg

SEQ ID NO: 1815 - DNA, 116 bp, Homo sapiens
gcggccgctgtggcccggctgccaggcgcaggcggctcccacccggctcggtctcggtgaccctgaccaaagccaggccggccgaggcaggctgcccagggccacttaaccaatcg

SEQ ID NO: 1816 - DNA, 54 bp, Homo sapiens
tcgagatggagtctcactccgtcgcccaggctggcgtgcagtgtcacgatctcg
